United States Patent Application Publication US 2026/0191916 A1 - sequence listing, part 94

SEQ ID NO: 609 - DNA, 1572117 bp, Bacteroides caccae
  source 1..1572117: mol_type = genomic DNA
agggaagttttttaagtcgaagaagaaaatgagatttcagttttatgaataataggcttattctagtagagggaatttactatgttttagtaaaagtattatttaaatattgtgagttatcagaaatggtagttggcttggatattttcgggtattctaaaaataattcggcatgaggacaaaattttgtttcccgaaatgatttttcggggaaattcgtatctttgtgctgttctagcaaggcttttaagtacaaaaatgaagaaccattcctgtaaatgcttagtaatcagatatggtaataaaagccccatttttttttgctcttattttctttcctgccggcttatttgtatctttgaaccctatataaaaagagtatttcaaatcgtaaaatcgtaaattatgttttccggaattgtagaagaatatgctaccttggtagcactggtgaaagaccaggagaatatacactttacatttaagtgttcgtttgtgaatgagttgaaaatcgaccagagtatttctcacaacggtgtctgcctgacagtagtaagtctgacggatgacacgtatacggtgactgccatgaaagaaacattggaacgttccaatctcggtctgttgaaggtaggagataaggtgaatgtagagcgtagcatgatgatgaacggccgtttggatgggcatattgttcagggacatgtagaccagactgcaacctgcattgatatcaaggatgcagaaggaagttggtactttacattccggtatgcgtttgataaagaaatggcaaagcgcggatatattactgttgataagggttcggtgaccgtgaacggtgttagtctgacggtatgtaatccgacagatgatacttttcaggtggctatcattccttatacttatgaatataccaatttccatacgtttacaatcggcagtgtggtgaatatcgagtttgatataatcggcaagtatatcagccggatgattcaatacaaataatatggaatatacagactttctgcaattggtactttcccggcagagtgaccgggcgtatgataaagaacgtccggtagaagcggagaagttggagaggattttagaggcgggtcgtttggctccttctgcctgtaatgcacagccttggaagttcgtggtgataactgaccgtgaattggctttaaaagtgggtaaggctgctgcaggacttgggatgaataaatttgctaaggatgctccagtgcatatcctgattgtagaagagtccgccaatatcacttctctacttggaggaaaagtgaaggataagcatttcccgctgattgatattggaattgctgctgctcatatcacactggctgctgaaagtgaaggactgggatcgtgtattttgggctggtttgatgaaaaggagataaagcgcttgaccggcatccctgcttccaaacgtctgttactggatgttgcgatcggatatccggtaaaggagaagcggaagaagatgagaaagccgcaggaaaaagtggtttcttataatcgttactgattctaaaagaataaatatttccaacttgtagaatagctatataacagaaggcgtcgttggttttaaaggaacgacttctttctttaaaaccaaaaatgaatgtattaggtcgctgatagatagtttaatataaaagccccatatttggggcttttatattaatatacttatttcttttttgacaactctttcagtagatgatctactgctgctttcagttgagcatcttctcctttcaggctggctcccggttcgttgtagaccagaatgtctggttgtaaagtttgattttcgagatattttccttgcatatccatacatcctacctgtgggataccgaatacgatagatgggtcaatctgtcgttcccaccatacagcagtcatggttcctgcaacgggagtaccaatcaattttccgatgcctaatgtcttatatacgtatggagtaccgtgagcattactgtaattgtcttcacaagctaacatacatgaaggcttcagccatttgttgaatgggtcgcttccgatatattgtccacgtggaacgaaacgctggtattcttttccgctcagaagggtaacgacgtcatcgtgcagccaaccgccgccattatgacgggtatctactatgacagcttctttgttgcggtaacgtcccagtaactcggagtacattttacggaagctcggactatccattccttttatatgtacgtaggcaatgcgaccgccagataactcctctactttctgtgcgcaacgtttcacccaacgtttgtagagcaattcactttgtgccccatagctgatagctttcacagtttcttcaaaacgctttttggtggccgggtcatatacggtaagtattactttgcgtcctaccttgccttcaaacaatgggaagtaatcagcattggcttcaatcgtttttccgtctactttttcgatgatacatcctgctttcacatcagttttcttttgagtgaaaggactctgatccagaatttctttgattttcagtcctgtaccactatatgattcatcatagaagacgcccaatgtagcggtagataatgcactgcctccacctgcataacgggctcccgtatgtgaggcattcagttctccgagcagttcgctcagcatttcagcaaagtcataattattattgatatgtggcaggaagcgttggtaagcttctttatatcttttccagtcggttccttgaaggtctgcgacatagaatttatcatttacctgttggtagacatggtcgaagatatatgcgcgttcgccataaggacgataatcgaagaaggcttcaaattcaatcggagtgactttgctgccggcgatttcgattttctttagttggcttcttgtgcacataaagatgttcttaccttctttatcggggatcaatgcacctccaccgactcctttgagcaatattttggtggtattttcttttaatttatgttcccacaaatcatagtcaccttcgaaagctgccagataatagagtacatcgcctttcggagtcagtactgcgtcactaagacgggaagaattgactgtcaggcggacaatgcgatcgaaacgattttcgaggtcgaaggtcagcggcttgacttcttcttttttcttgtcttcttctttcttggtatcttttgttttagcgtctttcttatctttcttcttttcagctttctctttctcctctttttccttcttggccttttcttctttctctgttttttcagcctcttcaagtagggcgaggtcctctttgctcatggtgaaacggttgtatgcatctacatcgaagaacatgatataggtatcgctttcgcttccccagctaccgtgactacggtatccggaacggtcactgttccatatcatggcttttccacccaatacccatttggcattggtgtcgctgtatccgctttcggtaaggttcaccatttctccttttccgtcagctttcaacagtaccacatctttattattccagccgcctataccaataaaatcagagagaatccatttactgtcgggactccattggaaccattggtcaccgtctgcataagaatactggtatttggcatccataacagtacgtacagctttgcttttcagattgataacacgaatagccgtacggttttcaaggaaagcaatctcctttccgtcagggctatactgtggttggaaagaagcgacgttagatttagtcaagcgttcttctttcaattcggtggcataagtgaactgcttttcttctttacgtacgatcgttgatgtgtaaagttgccaaagtccgttacgttccgatgagtaaactaaagtacgtccgtcgggggcaaaactgatgtcacgttcctggtcgggagtattcgtaatttgcttcgttgttttgtagtcgatagaagtgacgtatacatcaccgcgcatgataaatgccacttccttacccttaggagaaacggcaatgtcagttgcgccgtacgatctgatctggcggatgatgtctttgtctatcttatccgacaggatagtgatatttactttttgtggctgtccgcccggaacaagcgtgtaaatctcgccattatagccgtagcataatttaccttcgcttgccatactcagaaagcgtaccggatgtttggtgtggaaagtgatttgcttggaagtatttgttccaggggtacgttggaagatgttgaacgaacctttttcttcactcaaataatagaatgacttaccgtcgggagcccataccggttcacggtcttcacctccgaaagtggtttgcttctggtatacgggcgtctttccgggagtatagctccagatgtcacgggcgataggggatacctgatgtttacgccagtagtcttcatatccttttttatcctgataaagcataactccttccttattaatagagatacactccataggcatggatgaaaacatggtgggacgtcctcctgtaacggccacttcgtatatctgctggaattgtcccgagggaaatccggcatcctcggcagaaggggcgatattagctgtgaacaggatatgcttgtcgtctttataagcgacaggcttttcgctgccggaatgagtggtcaatcgttgggggactcctccctctttggcgacaacgaaaacatcaagactccccatgcggtcggatgcaaaagctatctgctttccgtcgggactccataccggagtggtgtcaaaagccggattcgtggtgatttgggtggcacgtccgccggttgacggtactgtgtaaatgtctcccttgtaggtgaatgcaatggttgttccgtccggagaaagagcgcaatagcgcatccatagtggagcttcttgtgccgcaattgttcctgcaaagcagagagcaaatgcacttagtagtagtttcttcatttttctttattataattgtgttaattcatttctaaaggtctaaggaggcgctatttataaatctttgagtagtactttacttgcctttttatagtattcttctctcgattctgtcagcaccttccattcatcgctaaattcttcgtctttatcaatcttgaaattctcggaaccgtatgtgtccaaacgatcaagcaaaattgctacatttaattggttgatatccatagaaggctgataaccgatatcttcacttttttggtcggttactacctcatgtatcaggtctatttcctgtaattgataaagtacttggttcgtcagccggatgggtatctgatgttcttccgatatttctgccgccgtataaggaggatcgttcttttcgaaccgtttggcgatgagtgacataatcaggatagagataaaatcccggtaacgcctgctgatattacgtgtgtcctggtcgaagctaaaactgcggatgttctgtcccgcgtatgccagttcagcaccgaacaggcagatagtccaggaaatctgtaaccagagcaggaatagaggaagtgcggcaaagctaccgtagatagcattgtattttgatacccacaactggctgttgatatataggaactggaaagcctgataagcggagccggccagaataccggcaataagagcgtgtttgaattttactttcgtgttcggcatgaaaatatacagcccggtgaacatcatccatgtgagaacgaaggggataagccgtatcatgaacttcatgacaggagcaagcaggacgaaatcatccatttgtttgagtatggtactcataaacagggaaagtcctccggaaacaactatcagaatcggcatcaacaggaacatggagaaataatccgtaatcttgcgatacatggaacgtgctttctttacttcccagatacggttgaatgtgatttcaatattgctgaccagattgatgaccgtccataacaacatcactaaacctactccgatgaaaacacctcctttggtttgtgagagataggaattgacaaaagagagaatggcttctgtcgtttctatatttcctccgaagccgttgcggaactggtgttccattaggttgtcgaacccgaagccacgggctacggcaaataaaatggcaagtatcggcacaatggcgagcagcgtgctgtatgttagcgcagaggccttgttagccattcggtctttggtgaaccggttgatacaaagatagatcgtttttataatattgtagagcgagaacttagttctggtcacttcgtcttccgtgatgcgccaaatgtcatacgtaagaaacttccatatatcagtgattttcttcttcatggctcagggttttaaaaagaaaaagcagtcagcctataagccgagttctgtaccttatataaataaggtgtctgtcatttatctgagtgacgtgtcaccacggcactttagcggtctaccctccgacatggagcgagcaactctcataacgccggtttacatgaccttacaactcctaagacgtacagcccgacatgtcaccatgcggctggtgggctcttactccaccttctcacccttacctctccccgaaaggaatggcggttattttcttctacgttactctaccctcacggacagctttctgttaggaagtaggatgctctgtgttgcccggactttcctcctgcacgaaaacgtgcacgcgacagaccggccaactgctttaggctgcaaaaatacgtcatttattttgttttagccaaagaatgtgtcacaaatagaaataatttctacctttgctatcattaaatcatggttcgatgaagaaaattatcctttttttctgctgctttctggcagttgcgtcagttaccctgaatgctcaggagatacgtcctatgcctgctgattccgcttatggagtagtgcatatttctgtctgtaatttacgtgacgaggggaagtttacctccggtatgagtacacaagcattgttaggaatgccggttaaagttctgcaatatacgggttggtacgagattcaaacaccggatgattataccggttgggtacatcgaatggttattacccccatgtcgaaggaaagatataatgaatggaaccgtgccgaaaagattgtggttactgcccattatggattcacttatgagaagccggatgagaaatcgcaaaccgtatctgacgtagtggcaggaaaccgcttgaagtgggaaggaagcaaagggcatttttataaagtctcttatccggacggtcggcaagcatatatttccaaatcgatctcacagccggagacaaaatggagagcttctctgaaacaggatgtggagagtattatcgaaactgcatatactatgataggcattccctatctgtgggccggtacttcttccaaaggagtagattgcagcggtctggttcgtacggtgctgttcatgcatgatattattattcccagggatgcatcgcaacaagcttatgtaggagaacgcatcgagattacttccgattttgctaatgtgcaacggggagatttggtgtttttcggtcggaaagcgttttccggacggaaagaaggtatctctcatgtcggtatctatttaggaaataaacagtttatccatgctcttggcgatgtgcatatcagtagctttgaaccggcagataagaactatgatgaatttaatacggggcgtttgctttttgcagtccgctttctgccatatataaataaggagaaagggatgaatactacggaacataatcctcactaccttccacaataacccctttattttattgtcttatcacacttataactttgaaaacatgcaaaacagaagagatttcttgaaaacggcggcttttgcagctttaggttccgggctagtggttcgccaggcattggccggggaattatcaccttctaccttatatataaataaactcggcttgggcgggaagatgaaaatgaagtttttcccttatgagttgaaattaagacatgtatttactgtggccacctattcgcgtactacaactcccgacgtacaggtggaaatagaatatgaagggatcaccggatacggggaggcttctatgcccccttatttaggtgaaacagtggagtctgtcatgaatttcctcaggaaggtgaacttggagcagttttctgatccttttcagttagaagacattttgtcatacgttgacagtctctcgccgaaagatactgcagctaaagcagcagtggatattgctcttcacgatttagtgggaaaattgctgggcgctccgtggtatcagatatggggattgaataaggaaaagacgccttctaccacttttactattggcattgatactccggatgtggtgcgtgcgaaaacaaaagaatgtgccgggcggtttaatatattaaaggtgaaactgggacgggacaatgataaagagatgattgagaccattcgctcggtgacagaccttccgatagcgatagacgctaatcaaggttggaaagaccgtcagtacgcgctcgatatgattcattggctgaaagaaaaagggattgtgatgatagagcagcctatgccgaaagagcagttggatgacattgcgtggataacccagcagagtccgttgccgatatttgccgatgagtctttgcagcgtttgggagatgtggcagcattgaaaggtgcttttacgggaattaatatcaagttgatgaaatgtaccggtatgcgtgaggcatggaaaatggtgacattggcgcacgcgctcgatatgcgtgtaatggtagggtgtatgacagagacttcctgtgctatatctgccgcttcgcaattctcgccactcgttgattttgccgacctggatggcaacctgcttatctccaacgaccgctttaaaggagtggaagtagtgcgaggaaaaatcaccctgaatgatttgcccgggataggtgtcatgaaaatctagtcttactgaatgaatgtcagagtgttaacgccacctgacatacaacgaatgtaaatttgtcaggtgttgtcgttaaccgctgttaagccctaaatattctctgttaaaagaggacaaaaaagtgtgacaagtagaataagtgaacgatatttgttattattttaacgtcgtaaaagttaaaacaatgtcgaatattaacattttaaagaattataaatcatgaaacagacaacaaagaacattctgggagtaggagctatcgttcttcttagctcaggagttgcaggattgacaacttacaaattgttgcaatctaacgaggctgctacagagacatcttttaatgagatgttcaagcagaatcccaatgtcaaattggctgcttttgacgcggtaaacgctcaacctgtcgatttgactcaagctgcggaaaattcgcttcatgctgtcgtacatataaggtctactcaggaagctaaaacaagaacggttcagcaagcgccggatatttttgatttcttctttggagacggacgcgggcagcaacgtcaggtgcaaactcagccccgtgtaggattcggttcgggggtgattatttctaaagacggatatatcgtaacgaacaatcacgtgattgatggtgcggatgaaatcagtgtgaaactgaatgataaccgtgagttcaaaggacgtgtgattgggaccgatcccagcactgaccttgcactggtgaaaatcgaaggcgatgattttccgactattccggtaggagattctgaagctttgaaagtaggagagtgggtattggcggtaggtaacccgttcaatctgaattctactgtaactgccggtatcgtaagtgcaaaagcccgttcgttgggagtatataataatggtatagaatcattcatccagacggatgctgcgatcaaccaaggtaatagtgggggcgcactggtgaatgcgaaaggcgaattggtaggtatcaactccgtactttcttctcccacaggtgcatacgcaggatatggttttgccattccgaccagtattatgacaaaggtcatcgccgacttgaaacaatatggaacagtacaacgtgcattgctcggtatccgtggtggttctattggtagtagtctaatggacgaccgtcagccgattgacaactccggtaagacattggcagataaagcgaaggaactgggtgtagtagaaggtgtatgggtttccgaaatcgtagaaaacggttctgcgtcaggagctgacatcaaggtagacgacgtaatcatcggtttggataataagaaggtgtccaacatggctgacttgcaggaagctatcgctaaacatcgtccgggtgacaaagtgaaagtgaaactgatccgtgacaagaaagaaaagaccgttgaagtaacgttgaagaacgaacagggtactaccaagattgtgaaggatgcaggtatggaaatcctgggagctgctttcaaagaattgccggatgatttgaaaaaacaattgaatctgggctatgggttgcaagtaacgggagtttcctccggtaagatgtcggatgcaggagttcgcaaaggatttatcattctgaaagctaacgaccagccgatgcgtaaagtcagcgatctggaagaagtaatgaaggctgcagttaagtctccgaaccaggtattgttcttgaccggtgtcttcccgtcaggcaaacgtggatacttcgccgtcgatttgactcaggaataaggtgtaaaataaggtaataagattacaggataagctaatgaaatagaaaaaggatgccgtcaatcaacttgccggcatctctttttgttttattagtagaaaaatatagtgtaaaagttacttaattttgtatgttaacaaattatttgtcgtaactttgcactccaaatctgtttttaaagaatgagacaactaaagattaccaaaagtatcactaacagagagagcgcttctcttgataagtatttgcaggaaatcggccgtgaagacctgattactgttgaggaagaagtggaactcgctcaacgcattcgtaagggtgaccgtgtagcattggaaaaattgacacgtgccaatcttcgtttcgtcgtatctgtggccaaacagtaccagaaccagggtttgagtttgcctgacttgattaatgaaggcaatttaggactgattaaggctgccgaaaagtttgatgaaacacgtgggttcaagtttatcagctacgctgtatggtggattcgccagtctattctgcaagcattggcagagcagtcgcgtattgttcgcctcccgttgaaccaggtcggttcgctgaataaaatcagtaaagccttctccaagttcgaacaggaaaacgagcggcgtccgtctcctgaggagttggcagatgaactggaaattccggttgataaaatctctgatacgctgaaggtgtccggccgtcatatttcggtggatgcgccttttgtggaaggagaggataacagcctgttggatgtgttggtgaacgatgattcgccaatggcggaccgctctctggttaatgagtctcttgcgagggaaattgatagagctctttctacgttaaccgatagagaaaaagaaatcattcagatgttttttggtatcggacaacaggaaatgacattagaagaaatcggcgataagtttggcctcacacgtgagcgcgttcgtcagattaaagaaaaagcaattagaagacttagacaaagtaatcgtagtaaattgctcaaatcttacttgggataagtaaggaatatcagtttctgaaagaaaaaagaatttgagtcgcataagtcgcacttttcatatagaagaatgtacttatgcgactttttatttagtttcccgtccgttatttctatgactaagaaatactatttatttgagataaatggaggtaatctcctcttttttcttacctttgccacaataaaatttatatgatatgaaatacgtaaaaatactatttgcaattgcacttgtgtttaccatgtgctcggctttttctttgaaaaaagatcactctaaacctgtttatgcttttgggatttctgcttcgtttacagatactgttgtatatttcacagaaattcagatcttggatagtgtgagtctcagtaaggaaggttttctggctcatcgtgaattgtatagctatcagttgaaaaattatctggaggacaatctgttacagcaaaatagtacatgtatgatttacttctcggagaacaaaagtaaattagagaaggaagcaacgaaaatcctcaataaatataaaaagagtaggaatatgacagtaacgcggattgaagctgataagttccgttttacgaaaccggaagaataataattgaattgttaatatggataagagatgtggtttgcatctcttatttttttatatttgtcctttgtaataaacttaaaactaatgaaaaagattaaaatactttccctttttgtatgcttgatagcattattggcagcctgtgaagatgaagatataacaccctcttatggtgcacgtacagtattggtttatattgcaggtaataatagcctcggtcagtctgactttgattcaaaggatgtgtcggaaatgatagaaggaatgaaaggcacggaggggacaacaaacaacctgttggtttattttgctggttataagaagactgccaagctgattcgtctgataaaaaatggaaaaggcgaggtgaaacaggaaactgtaatgagttatgataaacacaattcggttagtcttgacgtgatgaaggatgtttttagaacggccttctctaattatccggctaagagttatggaattgttttttggtctcatggcgatgggtggctgcattatcagaacccctcaactcgttggtggggacaggatacaagcgatggagattatcgaatgaatatttcggatttgcacgaggcattgtctgttgctcctcattttgattttatgctgtttgatgcttgttatatgcagtctgttgaagtgatttatcaattacgtgaccgtactgattattttataggttctcctacggaaataccgggaccgggtgctccgtatgaagcagtggttcccgcattattctcacaagataaaccggaaattaatattgcagagagctattatacagtttatgctgaaaaatataataatggcatagggatttctaacgaaaactggacgggtggagtctctgtttcggttgttaagagtagtgagcttccggcattggctactgccactaaaggggttttgcagacagctgcttcaatgcagcaaagagctaatatagatattacggggattttgtgctatgatcctttgcgcagtaagaactatcatgatttaatgggattgatgaaaaaaatccaagaaaaccaacaagcatttgataactatgcccatgcataccaaaacgctgttgtttggaagaatactacggataataattattgtacctatccttcggggtatggggaaatggtttcaatgaacggttttgaaggactttctacttatatattacgggggaatgatgtaaagcaagatgcatattatcgtcagtcggtagaatggtattccgctgccggttgggctgatgtatattggtaattaaattggcagcgtattttactatggatacacaaaatattactcctttaacaccacaaaaagacagacaggttagtggctggctctcattttttctttttgttgtaggtcttggtgcggcaataacagttgttacttcaattgcagatttttctttagatgcttatgacataggagtgggagacttttttatctatcttgtggcattaattgatattgtttatgttttggggattggaggattggctctttatacgatattggcttttttgaataagcggttgaatgcggtctttttgggtaaaagttatctcattattatttttctctctaatctattactattattaggtggagattacggtgattatggttggggcagtctgccgcaaattctaaaggctttgatttttgggattgtttggcttgtttatctttgcttgtctgagcaagtttccgatttatttccgaaggaagaacggaaaattttgagtagagataaatatatagttggttctttgatatttactccggtacttttgttaggcatttcaatgttggtttattggggaagtgttccaactcctatgaatattactttaggacatggtgattacagtgatggtattattgcttttcatgcacctgaaggtgctatttgcgagaaggatacagttgataatgtatgtcatacttttgctattggtgacagtatttggggtgttgtcattggattttatgataccaacgctagtgaagaatatttcaaggaatgtattgattcatggcgtaatacagaactggatggatatgatttttctatcctcaatactcatcaggaagtgattaatcagagtaatataatgcgtatgcaatctgtaaagtatgaaactcgtccaatattgatttggcagttctctatgttgctcagcccggaaacaggtaaggcatgtattgtttccttgtattctacaactgagaaaattgaaaatttggtaaatgatcttatggcttctgtgcgttttaagtaaacctctataaaagttgaaaagtataacatcgatctgccacctgcaataaaatctattcatacaggatatgattgttttctctctatggacagggaaagtgtttctacgtttagaaactccagttccgaggctggaaattctagtttctccgtatggaaattagagtttctaagcgtggaaacggaagtttataactgtggaaatgccaaggaactcatagcttttatcagactgttattcgtgttttgttgcaggtggcagatacattcttgtttttcaattctattgtaggtatcttgtttatggctgtgtttcgcgggaaaaggatttctaccaaaggagatctgaacaataaaacagcttttgtataagttgtattatataataatgtgtagtcattctacatgggttctccctgcagtaaaatttatgttctacaacatccttgtcaatcagcgtgttacaaaaaagtttcaaaaaagattagaaaaaatagtcatatatatttggatgttatggataagttgtctacttttgcacccgctttgctagagagacagagcctaatgattgacattctgctaatgataaagggttcggaaaataaaaaccaaaaaacttcgaaaaaagtttggatgttatctgaaaaagtccttatctttgcatccgctttcgtaaagaaagcagtgcggtgaaagccacattagttctttgaaatattgataaacaatacaagtagtacaagaaaagatagaaccgtcaatacagtctgttatatatgttcatatatatgtgatagatataggtattagaatgaagtcaataaattgtacggcatcctgaacagagctataaccggcatatgccgattaaaaaatacttttacaatgaagagtttgatcctggctcaggatgaacgctagctacaggcttaacacatgcaagtcgaggggcatcagtttggtttgcttgcaaaccaaagctggcgaccggcgcacgggtgagtaacacgtatccaacctgcctcatactcggggatagcctttcgaaagaaagattaatatccgatagcatatatttcccgcatgggttttatattaaagaaattcggtatgagatggggatgcgttccattagtttgttggcggggtaacggcccaccaagactacgatggataggggttctgagaggaaggtcccccacattggaactgagacacggtccaaactcctacgggaggcagcagtgaggaatattggtcaatggacgcgagtctgaaccagccaagtagcgtgaaggatgactgccctatgggttgtaaacttcttttatatgggaataaagtggtccacgtgtggatttttgtatgtaccatatgaataaggatcggctaactccgtgccagcagccgcggtaatacggaggatccgagcgttatccggatttattgggtttaaagggagcgtaggcggattgttaagtcagttgtgaaagtttgcggctcaaccgtaaaattgcagttgatactggcagtcttgagtgcagtagaggtgggcggaattcgtggtgtagcggtgaaatgcttagatatcacgaagaactccgattgcgaaggcagctcactggagtgtaactgacgctgatgctcgaaagtgtgggtatcaaacaggattagataccctggtagtccacacagtaaacgatgaatactcgctgtttgcgatatacagtaagcggccaagcgaaagcattaagtattccacctggggagtacgccggcaacggtgaaactcaaaggaattgacgggggcccgcacaagcggaggaacatgtggtttaattcgatgatacgcgaggaaccttacccgggcttaaattgcaaatgaattatggggaaacccataggccgtaaggcatttgtgaaggtgctgcatggttgtcgtcagctcgtgccgtgaggtgtcggcttaagtgccataacgagcgcaacccttatcttcagttactaacaggtcatgctgaggactctggagagactgccgtcgtaagatgtgaggaaggtggggatgacgtcaaatcagcacggcccttacgtccggggctacacacgtgttacaatggggggtacagaaggccgctacctggtgacaggatgccaatcccaaaaacctctctcagttcggatcgaagtctgcaacccgacttcgtgaagctggattcgctagtaatcgcgcatcagccatggcgcggtgaatacgttcccgggccttgtacacaccgcccgtcaagccatgaaagccgggggtacctgaagtacgtaaccgcaaggagcgtcctagggtaaaactggtaattggggctaagtcgtaacaaggtagccgtaccggaaggtgcggctggaacacctcctttctggagcgatgtcgttacaatgacttcatggttcatttcctttaggggaatattgaaccgggttctgttcagattgtactactggtacttgtttatttataatatatagatcaaccatctatagtaatatagatagagataaacaagagaaaacagaagccgagtctaaagacagacacggttgaactagtcctatagctcagttggttagagcgctacactgataatgtagaggtcggcagttcaactctgcctgggactactccgaaacgactcttacgggggattagctcagctggctagagcatctgccttgcacgcagagggtcaacggttcgaatccgttattctccacatccccagcaatgggaaacgatctttgacatgatgtacaaaaagtaaaataaaagtaaagagctaaaagtatatatcaaaccgtactctctccgatatttcccatttcagtaatggatagttttcggagcagtcagtttgaaagaaagtaagcaagggcgcatggcggatgccttggctctcggaggcgatgaaggacgtgataagctgcgataagcttcgggtaggtgcaaataacctttgatccgaagatttccgaatgggacaacccgacattctgaaggaatgtcatcctgcttggcaggaggctaacgcagggaactgaaacatcttagtacctgtaggaaaagaaaataataatgattccccaagtagtggcgagcgaacggggattagcccaaaccaatgttgttacggcaatattggggttgtaggaccacgttgtcgcaagacattcagtgagaagaattctttggaaaatgaaaccatagacggtgatagtccggtattcgaagctgaacgaagcgtagtggtatcctgagtagcgcgggacacgaggaatcttgcgtgaaccagccgggaccatccggtaaggctaaatactcccgagagaccgatagcgaaccagtactgtgaaggaaaggtgaaaagcacttcgaatagaagagtgaaatagtccctgaaaccatgcgcctacaagcggtcggagcagcttatgctgtgacggcgtgccttttgcataatgaacctacgagttactttttccggcaaggttaaggatctggagatccgtagccgaagcgaaagcgagtctgaacagggcgataagtcggaaggagtagacgcgaaaccaagtgatctacccttggccaggttgaaggttaggtaacactaactggaggaccgaaccgataagcgttgaaaagcttccggatgagctgagggtgggggtgaaaggctaatcaaacttggagatagctcgtactccccgaaatgcatttaggtgcagccttgtgagttactaatgtgaggtagagcgactgataagatgcgagggcttcaccgcctatcaagtcttgataaactccgaatgcgcattagttctatcacaggagtgagggcatgggtgctaaggtccatgtcctaaaggagaagaatccggaccatcagctaaggtcccgaaatagatactaagttgaactaacgaagtcagattgctaagacagctaggatgttggcttggaagcagccattcatttaaagagtgcgtaacagctcactagtcgaggagtttggcgtggataataatcgggcatcaagtatcttaccgaagctatgggatcattaatgatcggtaggggagcattccactccgcgtcgaaggtgaagcgtgagctttgctggagcgtgtggaaaagcaaatgtaggtataagtaacgataaagggggtgagaaaccccctcgccgaaagactaaggtttcctgatcaacgctaatcggatcagggttagtcgggtcctaaggctcagccgaacggtgaggccgatggcagaacaggttaatattcctgtactaccttaaggagtgacgtggagacggagtcgtgacaacgccgcggactgacggaatagtccgttgaagggtgtagatgttgattgtggcaggcaaatccaccacgagagtcgaacctgatagtataccaattccttcgggaaacggtaatagtgcgtgtaaacatactcccgagaaaatccgctaaacttaatccttgaggtacccgtaccgcaaacggacacacgtagtcgggttgaatatactaaggcgcttgagtgattcacggttaaggaactaggcaaattgaccctgtaacttcgggataaagggtcccaacgagagttgggcgcagagaataggtccaggcaactgtttaacaaaaacacagggctgtgccaaattgaaagatcacgtatacagcctgacacctgcccggtgctggaaggttaagaggagatgtcatcgcaagagaagcattgaattgaagccccagtaaacggcggccgtaactataacggtcctaaggtagcgaaattccttgtcgggtaagttccgacctgcacgaatggtgtaatgatctggacactgtctcaaccgtgagctcagtgaaattgtagtatcggtgaagatgccgattacccgcgatgggacgaaaagaccccgtgaacctttactatagcttaacattgaatttgggtaattgatgtgtaggataggccggagactttgaagcgcagacgccagtttgtgtggagtcgctgttgaaatacggccctttgattatttgagttctaacccgttgtaacggggacactgtttggtgggtagtttgactggggtggtcgcctccaaaagtgtaacggaggcttctaaaggtgccctcaggacgattggtaaccgtccgtagagtgtaatggcataagggcgcttgactgggagacatacaagtcgatcaggtaggaaactagagcatagtgatccggtgtttccgcatggaagggacatcgctcaaaggataaaaggtactccggggataacaggctgatccctcccaagagctcatatcgacggaggggtttggcacctcgatgtcggctcgtcacatcctggggctggagaaggtcccaagggttgggctgttcgcccattaaagtggcacgcgagctgggttcagaacgtcgtgagacagttcggtctctatctatcgtgggcgtatgaaatttgcgtggctctgacactagtacgagaggaccgtgttggactgacctctggtttaccagttgtgccgccaggtgcattgctgggtatctaagtcgggattggataagtgctgaaagcatctaagtacgaagccagccacaagattagatttcttagggtcgtcaaagacgatgacgttgataggatgcaggtgtacaggtggtaacatcatagccgagcattactaattgcccgtccactttctttctgcgggacggttgttatatacgtttagcttgtcaaatgtctttcattttacttttcgtcatgtcataacctttttcaggtggttatagcacgagggttccacctcttcccattccgaacagagaagttaagcctcgtcacgccgatggtactgcgtaacagtgggagagtaggtagccgccgttttttatgaagcctcgcttgtctatttgacgggcgaggctttctgtttttaactgtttggattatctcttattttatgatttaatctttcatatagccgctttggtatccctttcttcgctttcagtatttcttcgttttttattctccttttgattttatatatttgctttctcccgtgagaatttcggaaaagtgtcatttagtaataagaatacgctgaaaacggaataaaatcggtgtagaagtgtgatttttttgcaagggaatatttttcttttcatctttcccttttttatcaaattgatttttgtaaatttggcgagaatctgatgaaggaacataattaatacagtaataatactaaatactcctgttaatatggaaaacaaaattcaagagttgaccgataagatttatcgtgaaggcgtggaaaaaggaaacgaggaagcgcaaagacttatcgcgaatgctcaggaagaagcaaaaaagatcattgaggatgctcacaaagaagctgactcaatcgttgctgcctctcgtaaatctgctgaagaactggcagaaaatacaaaatcagagttaaaactattttccggtcaggccgttaatgcactcaaatcagagattgctactatggtcactgacaagttgattaccgcttctgtaaaggatttcgctcaggataaagattacctgaatgcgtttattgttgcattagcttctaagtggagtatagacgagcctatcgttatctcgacagctgatgcggaatcattgaaaaaatattttgcagctcatgcaaaagctttattggataaaggtgttactatccagcaagtaaacggtatcaagaccttgtttacggtttctccggcggacggttcatataaagtgaacttcggagaagaagaattcatgaattacttcaaagcgttcttgcgtcctcaattagtagaaatgctattttaaaagaagcgactatgagtagtaagtactattacttggtagcaggtttgccggaactttcactggaagacagcaaactgagctatacagtagccgattttaaaactgaaatctacccgggattatctgcttcagaccagaagttgattgacttattctatctgaagtttgacaatgccaatgtgctgaaacttctcaaagacaaagaggcggaaattgataaacgaggaaactattctgctgccgaactcactgagtatatttctatgttgagggaaggcggagaaatcagccctaaggaatttccggtttacctttctacatttataactgattatttgaatactccggccgaaagtacggtgttgcatgaagatcacctggctactttatattatgagtatgccatgaaatgtggaaataagtttgttgctgcctggtttgaattcaatttgaacatcaataatattctggttgcatttacgagccgtaagttcaaatgggatattgcttccaatattgtaggtaatacggaagtgtgcgaagcattgcgtacctccagtgcccgcgatttcggattgtctggtgaggttgatgtttttgagtcattggtgaaaatcagtgagattacagaactggtagaacgtgagaagaagctggacgctttacggtggaactggatggaagatgctattttcttcgattatttcactgttgagcgcatttttgctttcttgttgaaactggaaatgattgagcgttggatctccttggataaagaaagaggtaatcagttgttccgaagcattattgagtcgctgaagaacgatgtacagattcctgcagaattcagataataaatttaaagaaatatatggcaacaaaaggaactgttagtggcgttattgccaacatggtgaccctcgtcgttgacggaccggtagctcagaatgagatttgttatatctctaccggtggcgataagttaatggcggaggtgattaaggttgtaggttcacaggtatatgttcaggtgttcgagagtacacgtggactgaaagtgggcgccgaagccgaatttacaggacacatgcttgaggtgacattaggcccgggtatgttatcgaaaaactacgacggtctgcaaaatgaccttgacaagatggacggggtttttctgaagagaggacaatatacgtatccgttggataaagaacgtgtatggcacttcgttccattggtaaacgcgggtgataaagtacaagcttccgcgtggctggggcaggtggatgagaacttccagccgttgaaaatgatggcgccgtttacattgcagggaactgctactgtaaagactatcatgccggaaggtgattataagattgaggatacgattgctatcctgactgatgaggaaggaaatgatattcctgtgactatgattcagaggtggcctgtgaaacgtgccatgacgaattacaaggagaaaccgcgtcctttcaaactgttggaaaccggtgtgcgtgtgattgatacgctgaatccgattgtggaaggtggtaccggctttataccggggccgttcggtacagggaagacggtgcttcagcatgctatttccaaacaagcggaagctgacatcgtaattatcgccgcttgcggtgaacgtgcgaacgaggttgtggagatctttaccgaattcccagaactggtggacccgcacacgggacgtaaacttatggaacgtacgatcattatcgccaatacttctaatatgccggttgctgcccgtgaagcatctgtatatacagcaatgacattggcagaatattatcgttctatgggactgaaagtgttgttaatggcggattctacttcacgttgggcgcaggcgttgcgtgagatgtccaaccgtatggaagagttgcccggaccagatgctttcccgatggatatttcggctattatctcaaacttctatggccgtgccggttatgtgaaactttctaatggtgaaacgggctcaattacttttatcggtacggtatctcctgccggtggtaacttgaaagagccggtaactgaaaacacgaagaaagtggcccgttgtttctacgctttggagcaggaccgtgctgataagaaacgttatccggctgtgaacccgattgattcttattctaaatatatcgaatatccggaatttgaagaatatatcaaaggtcatatcaatgatgaatggattggtaaggtgaatgaactcaaaacccgtttgcaacgtggtaaggagattgccgaacagattaatatccttggtgacgacggtgtgccggtagaatatcacgttactttctggaaatcggaattgatcgactttgttatcttgcagcaggatgcattcgatgaaatcgatgccgtaacacctatggaacgtcaggaggatatcttgaatatggtgattgacatctgtcatacggagtttgaatttgataacttcaacgaagtaatggattacttcaagaagatgattaatatctgtaagcagatgaactactcgaagttcaaatcagagcagtatgagggattccaacagcaattgaaggaattgattgccgaaagaagtattaaacagtaatttgtaaatagctaaattgtaaatatataaatggcaacaaaagcttttcaaaagatatataccaagattactcagattactaaggctacctgttcgttgaaagcaacgggagtagggtatgatgagcttgccactgtggatggtaaactggcacaggtggttaagattgctggtgacgatgtcactttgcaggtatttgaaggtacagagggtattcctaccaatgctgaagtcgtatttctcggcaaatctcctacattaaaggttagtgagcagttggcaggacgtttcttcaatgcttttggtgacccgattgacggtggtcccgagattgaaggacaggaagtggaaatcggtggtccgtcagtgaatccggttcggcgcaaacaaccgtcggaactgattgcgacaggtattgccggtatcgacttgaataatacgctggtgtccggtcagaagattccattttttgctgaccccgaccagcctttcaaccaagtaatggcaaatgtggcattgcgtgctgaaacagataagattattctgggcggtatgggtatgacgaatgacgactacttgtactttaagaatgtgttctccaatgctggtgctcttgaccgtattgtgagtttcatgaatacgaccgagaatcctccggtggaacgtttgttgattccggatatggcgttgactgctgctgaatattttgcagtaaataataatgagaaggtgttggtgttgttgactgatatgaccagctacgccgatgcgttggcaattgtatctaaccgtatggaccagattccttcaaaagactctatgccgggttcgatttattccgatttggcgaagatttacgagaaggcggtgcagttcccttctggtggttctattacgattattgcggtgactactttgtccggtggcgatattacgcacgctgtgcctgataatacaggttatatcacggaaggccagttgttcctgcgtcgtgatagtgatattggtaaggtaattgtcgatccgttccgttcattgtctcgtttgaaacagttggtaaccggtaaaaagacacgtaaggaccacccgcaggtgatgaatgctgctgtacgtctgtatgccgatgctgctaatgcgaagaccaaaatggaaaacggtttcgacctgacgaactacgacgaacgtacgttggctttcgcgaaagactattccaaccagttgttggccattgatgtcaatcttgatacgactgaaatgttagacgtagcttggggcttgttcggcagatacttccgtccggaagaagtaaatattaagaaagacctggtagatcaatactggccgaaaggtgaataattagcactagtaataactgataattagtaataacaacgtggctataaagtttcaatataacaaaacctcccttcagcagctcgaaaagcaactgaaagtgcgggtacgtacgcttcctattatcaagaataaggaaagtgccctccgcatggaagtgaagcgctgtaaaacggaagctgccgatttggaggataggctcgaacaacaaattcaagcctatgaagccatgttcgccctttggaatgagtttgacgcttcattgataaaggtgaatgatgttcatcttggcgtgaagaagattgcgggtgtacgtgtaccgctactcgaaaatatagatttcgagatacgtccgtacagtatgttcaacgctcccaagtggtatgccgacggtatccatttgttggaagaactggcccatacggcaatcgaacgcgagtttatgctcgccaagctgaatctgttagaacatgcaaggaaaaagaccactcagaaagtgaacctttttgagaaggtgcagataccaggctatcaggatgcattgcgaaagatcaaacgatttatggaagatgaagaaaacctgtcgaagtcttcgcaaaagatcatgaagtctcatcaagaaaaaaggaaggaggtagaagcatgattacaaaaatgaagaaactcacattcctggtttatcacaaggagtacgaagaattcctgaacagtctgcgcgaacttggtgtggttcacattgtggagaagcaacaaggtgctgccgataatacggagttgcaggagaatattcgccttttcaaccgcttggcggctactctgaagttgcttcaaaatcagaagcatgaaaagaatgccgtgattgctacggaaggtggaacggctacccgcggtatgcaagtactggacgaggtggatgctctgcagacggaacacggcaagttgtcccaacagctacaaagctatgcgaaagagaaagaagtattggaagtttggggtaactttgagccgaccggcattcagaaactgaaagacgccggttatataatcggtttctatagctgttcggaaggaaattacaaagaagaatgggaaacggaatacaatgcaatgattgtgaaccgtatttcttccaaagtattctttgtgactgtaacgaaggccggacaggaagtggacttggatgtggagcaggcgaaacttcctgcatactctctgtcacgtcttgaagcgctttatgatacgaccgaacaggcaatcgaagggaatgaaaagaaactcgttgcactttccgagacggatattccttctttgaaggcagctttgaaagagttacagagtcagattgaattctctaaggttgtattgagttccgaacaaactgccggtgataagctgatgttgattgaaggatgggctcccgcatacagtaaagtggaaatagaggcttatctgaatgacgcacatgtatattatgagattacggatccgatgccgggtgataatgttcctattcgattgaataataaaggattctttgcctggttcgaaccgatctgtaagctgtatatgcttccgaagtataatgaactggacttgactccgttctttgccccgttctttatggtatttttcggactctgtctgggagactcgggatatggacttttcttgttcctcggagcaacggcatatcgcttactggcaaagaaggtaactccgtcaatgaagtcgattatttcactgatacaggtactgtctgcttcaaccttcttctgcggtttgctgacgggtacattcttcggagcgaatatctatgatttggattggcctatcgtgcaacgtctgaaacatgcggtcctgatggacaacaacgatatgttccggctgtcgctgattttgggtgttatccagattctgttcggtatggtactgaaagctgtgaatcagacaatccagtttggtttcaaatatgcaatagcaacgatcggatggattatcctactggtttcaacggctgtttcggctttattctcttcttcggagttgttgtcgatgggaggtacggcatataaggttgttctgtgtatttccggtgctatgatattccttttcaacactccgggaaagaacatatttatgaatatcggactcggtttgtgggattcatataacatggttaccggtctgctgggagatgttttatcatacgttcgtctttttgcccttggactttcaggaggtattctggcgggagtattcaacagtctggcggtaggtatgagtccggataatgtaatagcaggacctattgtaatggtgctgatttttgttatcggtcatgcaatcaatatgtttatgaatgtgctcggtgcaatggttcacccgatgcgtctgacgttcgttgagtttttcaagaactccggttatgaaggtggcggcaaagagtacaagccttttaaaaattaagaattaaagaattaaacaataaaaaatagaataagattatggaaatgaatttgtttattgcctatattggcatcgcggttatggttggtttgtcaggcattggtagtgcttacggagtaactattgcaggtaacgctgctatcggcgcattgaagaagaatgatagtgcattcggtaacttccttgtgttgactgcacttccgggtacacagggtttgtatggttttgccggttactttatgttccagaccattttcggcatcctgactcctgaaattactgctattcaggcttcagccgttcttggtgcaggtattgctttgggattggttgcgttgttctctgctattcgtcagggacaggtttgtgcaaacggtatcgctgctatcggccagggacacaatgtttttagtaatacattgattttggccgtattcccagaactttatgctatcgttgctttagctgcaactttcttgatcggtagtgcgcttgcataatttttttctgcaagaaactttttcaataaagaactttcaatccccttgtgaatgccgttttgcatttgcaaggggatgttcttttttctttgtcaaccaacttttctttcttcttattaactcatatttttcgcataaagtattatttttcaaagaataatgtgtacttttgcactcgcatactaaaaagagttttaatatattatatggtaaaagatttattaacccccgattatatcttcgagtccagctgggaagtatgtaataaagtgggagggatatacactgtcttgtcgacacgggcgaatacattgcaggaaaagtttcgcgacagaatttttttcataggtcctgatgtgtggcaaggaaaagagaaccctctattcattgagtcagataatttgtgtgctgcctggaaaaagcatgcatttgagaaagacgaactttcggttcgtgtcggacgatggaatataccaggtgagccgattgtcattctagtcgattttcaacctttttttgagaagaaggacgatatatacacagatatgtggaatcgttttcaagtagattcgttgcatgcttatggcgattacgacgaagcttctatgttttcgtatgctgcaggaaaggtggtggaaagtttctaccgctacaacctgacagaaacggataaggtggtatatcaggcacatgagtggatgaccggaatgggagcactttatatacaggaggctgtgccggaaattggtactattttcacgactcatgcaacatcgatcggccgttccatagcaggtaacaataagccgctgtatgactatctgtttgcttataatggtgaccaaatggcacaggaacttaatatgcagtcaaagcattctatcgagaagcagactgcacattatgtagactgcttcacaactgtaagccagattaccaacaatgagtgcaaggaactgttagacaaaccggcagatgtagtgttgatgaatggttttgaagacgatttcgtaccgaaaggaagtacatttacgggaaaacgtaaacgtgcacgtgccttgatgctaaacgttgccaataaattattgggaacaaatatgggggatgatacgttaatcatcggaaccagtgggcgttatgaattcaaaaataaaggtattgatgtattcttggaatcattgaaccgcttgaacagggacaaaaacttgcataagaatgttctggcattcatcaatgtccccagttgggtaggagatccccgtgaagatttgcaggaacgtttgaagagtaaagagaagtttgatactccgctcgaggtgccgtttatcactcattggttgcataacatgactcatgaccaggtgttggatatgctgaaatatctgggaatgggtaatcgtcccggagataaggtaaaggtgatatttgttccttgctatctggacgggcgtgacggtattatgaacaaagaatattatgatatattgctgggacaggacttgagtgtctatgcttcttattacgaaccatggggatatactccgctggagagtgtagccttccacgttccaacaataactactgatctggcgggatttgggctttgggtaaatagcttgaagaatcagcatggtatcaatgacggggtagaagtgctgcaccgttctgactataattattcggaggtggcggatggtatcaaagatacaattacgctatttgcggataagtcggaaaaagaaataaaagaaatccgcaagcgggctgctgaagtggcggaacaggctctgtggaaacattttatacaatattactatgaggcttacgatattgctttgtgcaatgcgatgaagcgtcagttgagttaagaaaaaattattcatcaataagtaaataagaacattatgaaaattaaagttagtaatgtgaatactcccaactggaaagaggttactgtaaaatcacgtataccggtagagttggagagattgtctgaaattgcacgtaacatttggtgggcatggaattttgaagcgacagaattgtttagagatctagatccggaactttggaaagaatgtggacagaatcccgtactgttgttggagcgcatgagctacgaaaagttggaggctttggcaaaagacaaggtgattctgagaagaatgaatgatgtttatacaaaattcagagattacatggatgtgaaatcggatgaaaaacgtccgtcagtagcctatttcagcatggaatatggtttaagtagcgtcctgaaaatatattccggtggtctgggtgtgttggccggtgactatttgaaagaagcatctgatagcaatgttgatctttgcgcagtaggtttcttgtatcgttatggttactttacgcagactttgtctatggacggtcagcagattgctaactatgaagcacagaacttcggtcaacttcctatcgaacgtgtaatggatgcagcaggcaatcctttagtggtagacgttccttatttggattattatgttcatgctaacgtatggcgtgtaaatgtaggacgtatttctttgtatctgcttgatacggataatgaaatgaacagcgagttcgaccgtcctattactcaccagctttatggcggtgattgggaaaaccgtttgaagcaggaaatcctgttgggtatcggtggtatcctgactctgaaagcactgggtatcaagaaagatgtctatcactgtaatgagggacatgctgcactgattaatgttcagcgtatctgtgactatgtagctacgggattgacattcgatcaggctatcgagttggttcgtgcttcttctctttatactgttcatactccggttccggcaggtcacgactattttgatgaaggactgtttggtaaatatatgggaggttatcctgccagaatgggtattagctgggacgacctgatggatctcggacgtaataatccgggtgacaagggtgaacgtttctgtatgtctgtttttgcttgcaacacttctcaggaagtgaacggtgtgagctggctccacggaaaagtttctcaagaaatgttctccactatttggaaggggtatttcccggaagaaatgcacgtaggttatgttactaacggtgttcacttcccgacttggagtgcaacagaatggaaacaactgtactttaaatatttcaacgaaaacttctggtttgaccagtctaatcctaagatttgggaagctatctataacgtgcccgatgaagaaatctggaagactcgtatgacgatgaagaataagctggttgattatatccgcaaatcattccgtgatacatggctgaagaaccagggagatccttcacgtatcgtttcgttgatggataagattaatccgaatgcgttgttgattggcttcggtcgtcgtttcgcaacttacaaacgtgcgcacttgctatttaccgatttggaacgtctttccaagatcgtaaacaatcctgattatccggtgcagttcctgtttacaggtaaggctcacccgcatgatggtgcagggcaaggtttgattaagcgtattatcgagatttcacgtcgtcccgaatttctgggtaagatcatcttcctcgaaaactacgatatgcagttggctcgtcgtctggtttccggtgttgatatctggttgaatactccgactcgtccattggaagcatccggtacatcaggtgaaaaagcattgatgaacggtgttgttaacttctctgtattagatggttggtggctggaaggttatcgcgaaggtgcaggttgggcgttaactgaaaaacgtacttaccaaaatcaggaacatcaggatcaattagatgctgctactatttacagtattcttgaaactgaaattcttccgttgtactatgctcgcaataagaaaggatattcggaaggctggattaaggtagtgaagaattctatcgctcagattgctccccattatacaatgaaacgtcaattggatgactactattcgaagttctacaataagttggctaaacgtttcgctattttgtctgctaacgacaatgcaaaagcgaaagaaattgctgcttggaaagaagaagtggttactaaatgggattctattgaaatcgtatcttgcgataaggtggaagagctgaaaaccggcgatatcgaaagcggaaaagaatatgtcattacttatgtaattgacgaaaaaggtctgaatgatgccgtaggacttgaattggttactacttatacgactgccgacggtaaacaacatgtttattcggtagagccgttcagtgtaattaagaaagaaggtgacttgtatacattccaggtggtacatagtttatcgaatgccggtagctttaaggtatcttaccgtatgttcccgaagaacccggatcttccgcatcgtcaggacttctgttatgtacgttggttcgtctaattgattgagaataagatagggtagagtgatcttcctctattgcttctctctataaaaaaagaggctgtctcaaaataaacttgagatggtctttttttgttttatttcagattgaagttattttggattcttctcaaaaaaaggagtttacaagcttctttttgaagatttcattctttcaaatagtttttttcgttgccataagcctcctaagaggctacttttgcaagattgtgtgctatgaccagcaggccgaactcaatttccaccttcttaagtccacgaaggtgaaacctcttgaagtgcttgttgttcttggggtttccaaatacggcttctacatcctgtggccgctgactgcggtatttaagaccttccggtgacaggagcttttcacgttccctttccttgatttttctcaggcggtgattcacctgtactatcctttctgaccggcttctgtgacaccggcatcttaacgggcaggcgttacagttacatgccctgtatcttgatatagtctgcacaaaaacgttgtctgttacccgctttgcatcggagagtctttccattctctgtcccatcggacagtacatgccgtcggtttcttcattataataaaagttggcagacaagaacggatcgtttttgaagcttcttttctgctccttatgaaaataattgtactttataaaggtttcaatgccatgtttgaaagcgtacagataattctcttcgcttccgtatccggcatcacagacagacacgtcagggtatctgccgtaaagtgaatggaaatcatccatgtgcagaggataagtggaggtatcacctgcacactggtggagggtatagttcaggatgaactgtttattggtactgatctggggattgtatccgggtttaagctgtccgttcttcatgtagtcctctttcatacgcatgaaagtggcatcattgtcagtctttgaataactgttacgtccgtcaagtatctttccctgtgattcgtatttcctcaactgttcagaccatgacttccttacacgtcttaccttcactttcatcttcttgtcggcatccactccattcagggcatcatctatctgctcgagtgccttttccactttctcaggggtgatatcctgatatgtgaccggagcggaatcacgcagttcctgtttggtgagggattctgcacaattccatatatcttcaagctattctgctattttagatatacgggtatgtatggacttgccccagacaaaagtgtaacggttggcgtttgcctccatttttgttccatcagtgaaagctacatccagacttacaaacccttccgccacgaggaactttacaatggtggcgaaaactgtcttcagcacatccttcagacgactgctgtggaaacagttgatggtgttatgatcaggagtcacattgccggtaagccacatgaaacggatgtcattgcggcagaactcttctatgcgacggctggaatagatattacgcaaataagcatagacaagaatctgaaacatcatgtgtgggtggtacgcagaacagcctttagtggaatacttacggtaaagttcttcaaggtttatctgttcaatgatacggtgaacaacccggaccggatcgttccgggggataaaatcgcctaaacatggaggtaaaagcagattatcgttggatgtgtaacctttaaacattatctttgggatatcttgacttgactccctaagatacaaaaaattagggagacgggcaagttctggctgagagaagttagggcttgccccatttttttgcaggcacaaaaacgaaggtgtgtcgtaatacacgatgcgccttcttttttttcattgactataaaaatcggttcattttctttaagctgcgatattttgaggatttctttggtttatgtgttcgcaacatctaaatagagcaactgtaagctcataaaacggtctaatcagccaatccataccttctttagtcatttttgcacacatcttttttatattgaaggcaatggcaaagaaggaaaagtccatgaagaccttatcctttccaaaatggcggaaacgtttgtaattcatattgtttttcatttgtccgaacacggcttccggttctatgcatctctgtcctctgtgtttcagtccttcctctgagcagagcagctctttggctttttgcttgtattttctgagtctgtgattcaactctatcgttctgttcccctttgctttaaaacatcggcatcttagcggacagccttcacatctgatggctctgtacgtggcattttcgctgacatatccggatgctgttttcacatgtctagtccctatcctttgcatcttctgtcccatggggcagatacaaaagtcttgttcttcattgtagtagaagttttccgccctgaacgggtccggtttgaatctcggccgctgttccatgtggaagtagttgtatttgacgtagcccgccataccgttttctgacatgaagcggtaattctcctcagaaccgtagccggaatcggccaccaccgtatgggccaacctgtcatatctgcttgagaaggattgcaggaaaggtatcatggtcagtgtatccgtagggttcgggaagagtgcaaaatcggtaatgaactggttctcggtgccgatctggaggttgtaaccgggctttgtctggccgttacgcatggcatcctccttcattctcatgaaagtagcgtccttgtccgttttggaataggagttcctgtcctgtagcgtgttcagacggttgtcgtattcctgcagcttgtccctgtgttcttccagttccttcagctgtttgcgtttctttttcaacgcagtcttttcctctttcgtggagggctcaggaacctgttcaagtgctttccgcaattctccagccatttcagtcagcatggccggagtgaactcaatctcctcattgctttccgatgagttctcctgggcgatgacatcgtctatctgccctaacaggacatgtatcttcttcatcaggcgttcacagttccgctcaaccgtttttcgccagacgaaagtatacttattggctttggactcaatctttgtcccgtcaatgtattccacattcagcctgatgaagcctttggaagagagaaggagtacggtttgggtaaatacctcgttgatttcctttttcacccggttgcggaaacggttgatggtaatgaaatcaggtttctcatatccggcaagccagatataatggatgtcacgatgaaggagcttttcaattttacggcaggagtagacgttgttcatataggcatagagaatgaccttgagcatcatcctgggatggtaagggctgcggccgcattccttatacaacttcctgaaactttcaaggttcaggctctcaaccagagcgtcaaccatccgaactggatcatgctctgcaatatcctcgtcaattctttgaggaaaaagcactgtttggttggaattataaggacgaaaatgtatctttgtcatagtgaaaatcttatgcctaaagatacaaaatctttaggtaataacaaagccccagcttgtgaaagtcggggctttgtgcttaaaaaaaagaaggtgcgcattttgacacacctcctttatttttttcgtctgcgtctgcgtctctgttgtttctggcggttgtatcgctgccacctcttataaatcatccaaccactcatcaaagcaacaacaataaagataagaatagtaatgcccacccctaaattatcccccttgatacgtgaccaaatatcaagaacttctttcgtcttatctccgaagtcacgaatcatagcacaccgttccactactttacgatccggatattgaatcttgtctatctgaatactgtccgcacccggtccgaaaaaataactcaaatcagcataataatcaagggtagtatctaccttttcttccagaatttcaggagtagctatcgaacttacatatccacaaaaatccatgttgcgcaaagcaatatccggacgacacataaagtttataaaataactggcagcctgcggattctttgcatatttcggaatcacccaaccgtcataccagatattactaccttcatcgggaacttcatagtctaagtctactcctaccgcattcgcttcctcaattgcccatattgcatcgccgctccaagtcatattcagccaagctttattcttcgtcatcatctcttttccgaaatcagcttcccaacctgcaatattaggtttcagggctttcagatatttttccgcaagttccatggcctgcggagaatagtcgttcatcaattcttcaaccgtaactgtcccttgctccagttccttggcatgagcatggatgatagctgttccgtaagcatcgcgataactatccttcatcagtatttttccggcatgtttcttattccaaagacattcccaagacgacgcaaccgaatcagaaacataagcccgattataaaggattcccgcagttccccacatatagcataccgcatagtggctggcttcttcacccggctgactcaatttattgatctgttcccgaataaacggagacacattgttcatataattgggagaatacgcaaagttcgtatcaataggcagtagtagatgtttcttcaacatacgttcgataatatactccgaaggacagaccacatcaaaatcctcatggcctttttcaatcttcgtcagcataatctcgtttatgtcgaatgtctgataaacaatacggatattttcaccggtttgctccttataatacgtctggaaatcttcgagaacaccatccccgatataatccgcccagttgtagattttaaggacccgctcacgcggttcaccggaattgtagcaaccggtcaaagtcagtaaaaacaggataacaggaattattcttttcatattatttacgtagcacattttagtattccattaatctttcttctgcgttttaccggcacggtaattgatagcaataagcaaagccagcactaccacaaaaataatagcggaaagcgggcgaagctccggcgttaaaccacctttacgggcatcagcatatatataagtagaaagtgtttccaagccttggttaccgatagtaaatacagttacggcaaaatcatcaatagagagtgtcaatgcaagcatgaagccactaatcattcccggacgaacctccggaataattactttccacaaggcttgcatgggagtagctcccaaatcaagggcagcttcataaatattcggattcatctgcttcaaacggggcaaaacacttaatacgacatacggtgtacagaatgtaatgtgtgccaatacaactgtcgtgtatccctgtgtgattcccaacgaaacaaacaaaaggaaaagagaaataccggttataatatcaccattcagaataggtatgttattcacaaaaccaatcgcctttcgtgagcgggatttcaaattaaagataccgatagcggcaatacttcccagcaatgtagatgcagttgcagcaagcaaagcaatagtaatcgtattaatcagtgcattcatcaaagagtgatgtgcacctgttgtgaaaagcgaagaatataatttagtagaaaagcctgtccagttacccaaaactttagcttcagtaaatgaataaatgacgataattacgatgggagaataaagcaacaacagcaatatccacaaataagtctgtgcaaatattttctttaccatagcccacctccttcgttagagttatctttatcatctgtactgaaaagtgaagtagcggctatcagcaacaacattatcaacgaaagtgctgctccataattccacatactgttatttatattctcctgaatggtcgtaccaaaaagttttatattgttcatcgtcagcaattcggcaatagcgaacgtcgaaatagtcggcataaaaaccatcatgatcccactcatcacgcccggcatggaaagcggaagcactgctttcagaaaaacttgcaggggattggctcccaaatcctgcgccgcctcaatatagctatgatccattttttgcaacgtattataaataggataaatcataaaagggataaagttatacaccataccgaatatcaatgctccttcacccaacggtacactgaagaagtcgaacagagcaacagtagctagagtccgcacaagaatatttacccacatcggcaggataaacaatacgaccattgttctagaacggttcagtttgctgttactaagtatccaggcagcgggataacccagcaaaatacaaataagtgtagtaatgatggcaatacctatggagtagacgaaggtattgattgcttcgggatgttcgaaaaacttctgaaaattggcaaacgtcagatgcccgttatcatcagtaaaagcatacacaacaattaggaccaacggtataatcacaaagatcgccgaaaaaataatgtaagggagggtccaactcttacgtgatgacaaaaagactaaaaacctcttattcacttcctttcctgttaatcggttattttaattacacgaatagcatccggggggatagtaatacctacacggtcaccatcatcccatacatcattcgtatctacaaacacattctcgtcccaatcggaaaaaacagtcagatgataatgatctcccttataaagaataaatttcacttcacctgtcaatgtaccgtcctcttcattatcctgaagaaccactttgtcaaagtctacctccactttaacatcctcattggattctattccttctaccggaacacattcgaagttacatcccagaaattccacatgagtagtatccagcaatttaccttcaaacgtgttacagccacgttctttcttcataatatgaatatcaaacggctttaccaacagaccgacttcggctcctacttcgaaatgatgataatcctgtacgaggaattcataacctccgcaaagcacggtcatttcatagtggacacctttaaaaatagaggtctgaacaacaccagtcaactgcgccatatccgaaacggggaagatataaaggtcttccggacgaatgactacatctaccggagtattctcaccaaaaccttcatctacacattcaaattccgtaccacagaaacgtaccagtttgtcatgtatcatcgtaccgttaagaatattgctttctccgataaaattcgccacaaacgaattgataggctcattataaatatcaatcggcgtaccgatctgctgaatctttccctcactcattacgacgatagtatcactcaaagtcaatgcttcctcttgatcgtgagttacatatacaaatgtaatacccaaagatttatgcatttccttgagttccatctgcatatccttacgcattttcagatcgagtgcagccaacggttcatccaaaagcagtacttccggctcattgacaatagcccgagcaatagccacacgctgttgctgaccaccggaaagagaatcgacatcacggtattcataatccgtcatacctaccattttcaaagcagctttcaccttcttcccaatagtctgtttgggtgtctttttcaactttaaaccaaaagcaatgttgtcgtatacattcaaatgcggaaatagggcatatttctgaaataccgtattcaccgggcgtttgtggggtggagtttgtgtgatttccttacccgaaattcggatttcgccttccgaagccgtctgaaaaccggcaatgagacgcaacaacgtggtcttcccgcaaccggaaggtccgagtattgtaacaaactctccctttttcacgttcagagtcacatcatccaatgctgttttctcgccaaaatacttcgagacatggctcacctcaatgatggatttatcttcttgcatattcatactaaagtttgggttgcaaaggtacacatttctgcggttttcacctacgtgttaatctaatataacagtgtttttcggtggccgagagaaaaataatctatctttgcataaatatttattcactaatcttacaaaagcatgaaaaagtttacttatttagttattgcaacggccgcgttgggcatggtagcttgtaccggtggaaacaaagccggatacgttgtcacaggtacagtagaaggtgcaagtgacggtgacaccgtctatcttcaggaagccaatggcagaaatctggtcaaactcgatacagccgttatcacaaaaggaacttttacctttgaaggtacacaagattctgttgtcagccgttatatcacttgtgaagtggacggagaacctttaatgattgacttcttcctcgaaaacggaaagattaacgttgccttaaccaaagacaatgattctgctaccggtactgcaaacaatgatgcatatcaaattgtcagagctcaaatcaacgacatcagcaaaaaaatgaatgctatctaccaatcaatgggtgacagttctttgagtgatgaacagaaagaagccaagcaaaaagagggtgcccaactggaagaacaatatgataaagccatcaaagaaggcgtacaaaacaatatcactaacccggtcggcgtattcttgttcaaacagaccttctacaacaactctactgctgaaaacgaagcattactgcaacaaattccggctaacttccagaacgatgaaacaattgtaaaaatcaaagaactgaccgacaagcagaaaaaaactgccgtaggtactaagtttgttgacttcgaaatgcagactcctgacggaaaaagtgtgaaattgtccgattacgtaggtaagggtaaagtggtattagttgatttctgggcaagttggtgcggcccttgtcgtcgtgaaatgccaaacttggtggaagcttatgctaaattcaaaggcaaaaacttcgaaatcgtaggtgtatctctcgatcaggacggtgctgcctggaaagaagcgatcaataaactgaacatgacttggccacaaatgtccgacctgaaattctggcaaagtgaaggcgcacaactttacgccgtaaacagtattcctcacacggtattgatcgacggtgacggtacaatcatcgctcgaggcctgcacggagaagaacttcaaactaaaatagcagaagccgtaaaataataaaaaagcctgtcgttcctcagcaaagacagtctccgactttaaataaataagggaggtgtgtcaaaatgcgcaccttcttttttttaagcacaaagccccgactttcacaagctggggctttgttattacctaaagattttgtatctttaggcataagattttcactatgacaaagatacattttcgtccttataattccaaccaaacagtgctttttcctcaaagaattgacgaggatattgcagagcatgatccagttcggatggttgacgctctggttgagagcctgaaccttgaaagtttcaggaagttgtataaggaatgcggccgcagcccttaccatcccaggatgatgctcaaggtcattctctatgcctatatgaacaacgtctactcctgccgtaaaattgaaaagctccttcatcgtgacatccattatatctggcttgccggatatgagaaacctgatttcattaccatcaaccgtttccgcaaccgggtgaaaaaggaaatcaacgaggtatttacccaaaccgtactccttctctcttccaaaggcttcatcaggctgaatgtggaatacattgacgggacaaagattgagtccaaagccaataagtatactttcgtctggcgaaaaacggttgagcggaactgtgaacgcctgatgaagaagatacatgtcctgttagggcagatagacgatgtcatcgcccaggagaactcatcggaaagcaatgaggagattgagttcactccggccatgctgactgaaatggctggagaattgcggaaagcacttgaacaggttcctgagccctccacgaaagaggaaaagactgcgttgaaaaagaaacgcaaacagctgaaggaactggaagaacacagggacaagctgcaggaatacgacaaccgtctgaacacgctacaggacaggaactcctattccaaaacggacaaggacgctactttcatgagaatgaaggaggatgccatgcgtaacggccagacaaagcccggttacaacctccagatcggcaccgagaaccagttcattaccgattttgcactcttcccgaaccctacggatacactgaccatgatacctttcctgcaatccttctcaagcagatatgacaggttggcccatacggtggtggccgattccggctacggttctgaggagaattaccgcttcatgtcagaaaacggtatggcgggctacgtcaaatacaactacttccacatggaacagcggccgagattcaaaccggacccgttcagggcggaaaacttctactacaatgaagaacaagacttttgtatctgccccatgggacagaagatgcaaaggatagggactagacatgtgaaaacagcatccggatatgtcagcgaaaatgccacgtacagagccatcagatgtgaaggctgtccgctaagatgccgatgttttaaagcaaaggggaacagaacgatagagttgaatcacagactcagaaaatacaagcaaaaagccaaagagctgctctgctcagaggaaggactgaaacacagaggacagagatgcatagaaccggaagccgtgttcggacaaatgaaaaacaatatgaattacaaacgtttccgccattttggaaaggataaggtcttcatggacttttccttctttgccattgccttcaatataaaaaagatgtgtgcaaaaatgactaaagaaggtatggattggctgattagaccgttttatgagcttacagttgctctatttagatgttgcgaacacataaaccaaagaaatcctcaaaatatcgcagcttaaagaaaatgaaccgatttttatagtcaatgaaaaaaaagaaggcgcatcgtgtattacgacacaccttcgtttatcataagttgcttgtaatagaagcgttatcgtcttttcattgtacggagggtgtcttttgtttccttatttatgcggagagattcgattgttttctgtattgccttgttgtaagtccaatcgtccagtttgctttgttgcaggtatttcattgtcttttgcggaaatttaataaagcagatagagatcatccatgccatagccatgcgtgcgtaataggcttcatgcttaaatagatcggcatatgctaataatgaatcaatatgctcttcgtttatataatggaataacattacaataccgaaacgtatttcaaattccttttgtgatttcagataaggctggataaattgccatacggtttcttttccttttcgtacggctgttttaagttcactgctaaaaatatcgcatactgcccaattgttgattcgaggaataaacaggcttatatagttaatctgttcgtcaaggttcattttggctaagccaataatcattccctgaagcattgtttcttcataataattggtattggttgtttcgacaaatggacgccaatcatctttcttgattatatcttttgccattgtccgcagttgaggtatacgcacaccaagaatattgtcggttccagggagtaggtaagagtggaattttcgatatttcggatctgctagtgcttttagttcttttcgaatgttttcagctgtagttgttttcatatagtttgttttttacaaaaataagaaaaaagagtgtgttttgattatatgtctactctctttcttatttcttttgtcaataatgtagtcactctattccttttttatagattcacagggtgttattttgaaatactctttatatctgttacgaaagttttttaagtttctaagtccgatcatctccggcactacatttacaggacattttccgctttctaacagttcgcgggctttttccatgcggatacggtagataaagaatttgggagcttctcctgtcagtaatttccatttattgtagaaagcggttctactcatacataattgtgaagctatgtcgtcaatagtcaggtcctctctgtctatattctctaaaatgaattcttttactttgttgataaatgtgaaattagcgttatctaagttttttgttgtctgtatccttataaattgttcaccgaatatttgttgtaaaaatgcttttctaaggaaacgactatttctaataagaacagttatttctatttttaaatcttctatatggaaaggaatatacagaaatgtatcagccagagatgtctctcttttgtgacgtcggtctatatcaatgtgggagccgtaaaggataataggaataatggaagtatctccggatgttttcaatcttgacgatagttcatttccactcatcccgtgcagtacggtatcgctaatgattaaatccggatgttcctcctttatactttccagtacttctgaaccattttcgaaactctttataatgtagtcttttgataaatgcgcttccagataaaacctgaaattttcattactgtcagcaatgataatagtaggcttggttgagcctctttggggaggaatcttgtggaataaattatctatttttttctcttcttgattttcattgatatgtattctagggcgttcgggtacatttttgtatgaatgctttagtgggaaattcaatgaaacattgtggtttaaatgattgataagaatcttcccgttgcataattctgtcagttttttgcaaaatatactttttgcaaaatcatattcaagttcttccttccgtttgagcaacggatgtcttttgcatttatagcattgtatcagttttctattttcgaagttgtttatgctgattttccagtgttctgtacttagagagattgagagtataattgtttttttcggttcggtatagtcgatagcgttcttaataaatttgtcgatgactggagatattttactttggtcgatccatgcactggcataatgaaattcagttttaacttttaattttacctgcttatttgcggcatgatcttttagtgaattgactctgtctttaagaaaatatcctagttcatactctgcaatatctatgctttggggatgaataaacaattgttttaggttcattaatctgtatagatgctcattgagacaatctatactgcgtaatagttcctgtctgatttcttcagggtaatgcttgttgcatatcatttgcaaagagatatgaatctgagtaataggaatacgtatgctttgaaaagaatctataaaatacagattctcttccttcaaaagatttgtttctttttgcatggtgataaaataggataaggaccagtataatgagactcctcctgctgttaatagaagaatggagtttaatagattggggatagctattactataatgatagaagtgaggagtgacgttgttattaagtatttcatatcaattcgttttttagaaacgccacttagtgggaattgacccactccttttgtttgagaaaaaagaggaagctcactgtaactatgatctcatagttgtacattgataaactcgagtagaataatgtttgagattatttactttttgaaggtcaatatctggaaaacgaggtctatatgtagagtctaaatcctaacattttgaatcatttttcaaggaatggtgaatttcctccaagtaacaataattaataaatcagtttttcttatttgttgaatgtcgcatattatgaatgcggcacgatgtgggaggtgagcgtattgtttgtatggtgctattgagagagctcctaattagcacctgtttgcgttttctcatatataaagtgaataattatgtaaaacgtcttttgttgtcagaaggtatctattgttacttcggtgtaaaaataatgataagtaataataaaaggaccgttttattatagtaaatgactgaatttggtaatatggtattgtaaaggtggtggttggtgttgtaaaattatgttttgttaatgctgtattcctatcatgttttgtgatatataaaaagagcgtgtcatatatacgtatgacatgctctttgatcgttttatagcaaataagtatttacctattttttgctcatatcgaagttgaatgtagtaatggggaactcatctaaagttgtattacccacttctacctttgtcgcttttatagcaaattttaatgtttttccattataggcaaaatctcctttttcgtctgcctgaacagttactatcacagtaatttcggttgcttctttttcatttgctgttagttgagtcgaaggatcaaatttaatttctagaggttcgggttgaagttgaagtaagatgttatctttgttttcgttgaaagtagctgtgtagggaattttgtaattgatatctccgatagctttaataataatttcagcttggtccggatcttcgatgatacttttaatcaggtcgtcaacaggaaatttattgatagcaatttcgttgtcttttacttctgcgtttacttcaattcctactggttcttcactttcaccagcattttctgtggggatgacaggggctgattcagttgtcattttacccaagtagtttccttctacgtctttaagagaatatacaggaatatcctcatcgtcatcattactacacgaagtaaaggtggtagccaagcttagtaccattacgaataaaacgaaacgattaaaacaatatacttttttcatttcaattaaagttttcatactgttaaaaattagattgttaattttcaaaattaaggtgtacgtacaataagtaaatacttgagatattgaaatactgcatgaagataataaaaaagacaaataagaatagtgacactattttctgaggaaggtgtcactgtttgagtgggatagtgaggctgtctaacaacaaaaagatagatggtctctttttggtaaaatcatcttctatggtctatgcaaatagtaagagttgtctcatcggtctttcgataacactccggaaggggttcaatctttattggatttgagagctggttatcggctctctttatccgaactcttgtctgtgctgaaaacatggtaagttatgttattgcctgacaaagacttggtgagattttgaggatggattattatacgtgacaacttggtcaagcaaaaagtattaagcataaagtcattggaaacattctcccaaatggctaagttcgctgcttgcggagggaaaacacaaagcgtctttaatcaatgttgtaagagccaatatcatagcaatgtctttttccgtgatacgaaagtaaattccattctattggtcgtataataaaaagttcttaattttgaaaatgtcttatgtttaggaagtagctatatacttctgatgagcagttacttgcatatacaaacttacccaagaatacgttgatgttagtaaacttgggtaagattttatagatctgctctgatactaaagaatatcagtttaaatatcaatatgtatctattatttctttaatactattcatgttgtttatcacttttctttcctcaaaaataccaaataaaaagtcgtttgtcaagtgtttcagaagaaaagctgattattcattgaaccaatctattttctttgagaaatacatcaccattgccaggataataaataatcccaagctgcctgtcaacagagcaaaagtctctaactggataaggacaaatatataaagatagagtactcccaataacccagacatgattaatgaaggtttctttctcttggtgatgccaaacatatatccgcctaccagtataatagtcagtgtagcagataacagataggcagggttgaagccgatgtgttcggagaaggagaggagcaaactgtaaaatagacagagtgccaatcccactaacaaatactgtaaagcatgaatacgggttttattcataatttcagtgaagaagataacgccgaatgtcaacaggataatcaggatagcatactttgcggaacgcatggattgctgatactgctctaccggaatcttgaaattgacgccgaaactggaattatctatatttttaatattaaaattggtatagtcaatcattacttgtgagtaattccggttcaagttcaagacttgccattgtgccgaaaattctttctcggtaatatcccggttattgggtaaatagcttcctgtaaagctcggtgtgttccaattggctttcaagtcgacgcgggttgttttacccaatgggatgaagttaatggattgcgagcctttcagtttgatttttacttcgtaaggcaatttcttattgttcttcagttccgataaatccgcaatggcatgtacgcccgtattatcaatccctctgttatccattcccggctcaaatacatagacggaatctccgaaggtgatactaatctgttcgctgataccacgcatgtcggtcagattcagacaaatagcggctctgtcgaattgcagttgccccatatctattctgctctttatcagttcttccgagctgaaagaacctttcagagtcagttccgattgatacacattgacttcatagagacttcttttcaggatttcggtctttagttgcccgttaatcaaaagttcgtcggggaagagtatcaggtctttgattgatacctttttttctccgttgttctctgtaaccaccggatattggatattcagataagggccggtgacggtctgtgcgagactccatttctcgcttacctcattgattgcttcttcctgcgtgcgtccccgttcggaaataagattttcaatcatgaacataggaatcatcagaagaaggattaatcccccgatgatgaccactttgattgttttggagaaacggtgaaggcatcccataggttgctgtgcttgttgctcgtttgaattttcattgaaaccgtccataagctgatagtgtttagatgaatgaattattttgattttaaaaattgctccagagcttcaatatgagatttgaaagcttccctgccttgcgaagtcgcttgaaaggcagttcgcggctttcgtccgacaaaacttttgttgcatacgatatatcccagttcttccagggcacgggtatgactggcaaggttgccgtcggtcaatgcgagctgttctttcagaaaattgaaatcagcttcctcattcaccatcagaacagccatgatacccagtcgtaccttgctttcgaatgctttattaatatattggaatgattctatcatttatgatttctttctttcgtaatgtaaatagaacaatatgccatagaggatatggaaaccaccgaaacctatcgtccagaacagaagtgaatgacccgcccagaaacagtcgacagcgcccaggcaaatgaaagcatatcccagccatgccacgctggaataggtaaacttggatgcattgaccaacgccagtccgtagaatagaagcatgacagatgccagaatatcataatactcgtgcatcaggatagaaatacacacaatgccgcctgtcagcatcggaagcgaaaaattccataatgcccgataggtgagccggctgaaaaacttctgtcctgtcttcttggatttgcagtaggacaggatgccggcagtaacggctgcggctgccagtaccgacagggctattatagccattaattccagggcaacgattaaatacgtgtccggtgtaataacttgtgtcgcgatgtacgcgccagccaatgcgtaaatgcctgccaggattgcggcaagcccactaacagagataaactttgaggacttttccatcaactcttttatctcatttaccgattctaatgctttatctttattcatgtaaaaagtactttgtaatacaaagtaaaataaaacatttaagatgaacaagattttatctgattatttcaataaataggttcaaaaaagaagttggatagatgaaattagtcaaatgtttgactaattcgacgaagatacgtatctttgcgcccgaaaaggtaaaaacgataataaaaatgagagaaggagcggagttcagagaactcatgttgcaggttgtccgtacacgtatggcttttcgtcggtctatgcaacgaacattaaagaagaataatgcaggtattacatttgagatgcttcaagtattgagcagtttatggcacgaacaaggcatcagccagcagatattggcggagcgtatagcgaaagataaagcatgcctgactaacttgatgaacaacctggaaaagaaaggatacgtctgccggaaagaagacccgaacgaccgtcgtaataaactggtatttctgactccggcgggtgaagagtttaaagagcagattcgtccggttttagaccaggtttatgtatatgcagaacacattatcggtattgaaagtattgaaaccatgttgtctgaattaaacagtgtttatgatgttcttgaaaaaatataaactatatccggtcattttattcagcctgttttcttttccccaattgatgcacgcacaaacagactctttatttcttactgtcgaccagctctttgaacggggcgtacaatatagcctgcaacttcaggcggatgcaatgaaagaatctatggcgcaggaacggacacggactgcaagaactgcgcgactaccggaactacagattggactgaaaggcggattcgtcggtcaacccgtcgtttgggaacggggactgtccgcacctctctacccggacgcgccggactggtcacaaaattatgcgattgatttggcacaacctctctatcagggcggtaaaatccgaagtgctatccataaggcggatattgaaaagcaagtcgccgaattgcagactttgaccgaccgggcggagattaaactgaaactgctgaatcagtatatgaatctcttcagcctctttaagcagcatgagatactgatgcgaaacattgaagaatcggaacttcggttgcatgatatacggcggatgaaaaaggaagggctgattactaataatgatgtattgcgaagtgagatgcagttgactaacgaccgcctgtctttgcaggaaacggaaaacagtattgtgcttgtatcgcagcaactcgatattctgttggggcaggacgagaatgtattattgcggccggatactgccctgctttatcaagcagttgccttgcaatcttatgatgattatatcgttcaggcttatgcgaacaacccggtgatgaaattgcttcgtgcacaaacggaactggcaaggaatgaaatccgttcaaccaagtctttctcattacccggtatatcgttatatgcatcgaatacattggcacgccctgtctcgcgtaccttggcggatatgtacaataacaactggaatgtgggcgtatcggtttcttatcctttatcctcattgtataagaacaatcataaaataaaagagagcaaaatgaggatgtctttgcggaagaacgaggaagagcagaaaatgcagggaatccgcatggaagtacgttccgcattcttacggcatcgagaagccatgcagagggtagaggctttgaaactgtccgtccggcaggcggaagaaaattaccgtatcatgcagaaccgctatctgaatcaactggctatcctgactgatttgctcgacgcaaattccgtccgcctgaatgtcgagttgcagttggttactgcacgcacccgtgtgatttatacttattatcaacttcagaaggcttgtggtcgtctttaatatacaaaacagatatggcaaatcaattgaaagaaaaacagaagaagctgaaaaagctcagaatccgcaatattattttaaatttggtatgtatctgtctggcaggttccggcctttggtggactgccacttacttttggcgttatgtaaattatgaagtgacgaatgacgcttttgtagaccaatatgtagcgcccttgaatgtacgggcttcgggttatataaaagaggtatgttttaaagaacatcaatatgtgcgtcaaggggatactttactggtgcttgacaaccgtgaatatcaaatcaaggtgaaggaagcggaagctgctttgttggatgtacatggctcacaggaagtgcttcattcgggcattgagactgcccatacaaatatcgccgtgcaggatgccaacattgctgaagcaaaaacgaaactctggcaactagagcaggattatcatcgctttgaacgtttgttgaaagaagaatccgtcccggagcaacagtttgagcaaactaaagctgcctatgaagcggcaaaggcgcgttatcaggcattggttgctcagaaacagtcggtactctcgcaatatacggaaacaagcaagaaaacaacgagtgcggaagccgccattttgcgcaaggaagcagacctcgacttggctaaactgaatttgtcttatacggttcttatcgctccctatgacggatacatgggcaggcggactttggaacccggtcagtatgtacagaccggacaaaccatttcttatctggtacgcaacaaggacaaatggattaccgccaattataaagaaacgcagattgccaatatctatatcggccaacaagtgcgtataaaagtggatgcagtgcccggaaagattttccacggagaagttaccgctatctccgaagcgacaggttccaaatattcattagttcctacggataactccgccggaaattttgtaaaggtacaacagcggataccggtacggattgaactggaagatgtctcttcggaagaaatggcacagttgagagctggtatgatggtagaaacagaagctctgcgcaaatgataacgatgaaagagttggaagcacctatccgccaatgggtgcccgattggctcggacttgtcagtatcttcgtcgtgattcttcctgtcactatgctcaatggttcttatacgggtagtatgcttgaagtttcgaatacactcggtacgaattcggaagatataacaatgggatattatgccgcttcggcaggcatggctatcgcgtatcccattattcctaaagtcctggctgccttttccgtgaaatcgctgttgttgattgacttgatactgcaattcttcctgagttgggtttgcgcccgtacgcagaatgctgatattctgattgtttgcagttttgccgtcggtttcctgaaaggttttcttatgctgtggtttatccgttacgcccaaaagattttcagccggaagaatgtgcgtagcgagttttattcttatttttatccgttagtgtacggtgggggacaggcttcgatgttggtaaccgctctgttggcatatcattataactggaaatatatgtattactttatgatgatactgattttgatagctatcttgtttgttatcatctgtttccgtcataaccgccccattaaagccgttgccttgtccgacttgcatattcgtgagatgtttgttatatcgaccggactgttgatgttgatgtacgttatcaattatggaaaagtgctcgattggatggcatccggtaagatatgtgcatatatcatcatagctcctatgctgattgccttgtttatctggtatcagagccattcggagaaaccttatgtaagtcttgcacccttatttcaggccaaagcgattgtcggctatctttatatgatgcttgtcatgtttttcagtacatcaaccactttattgactaactatctgactattattctgaaagtggacactacgcatacctattccctttatatctatctgcttcccgggtatatagtcggtgcgtttatctgcttctggtggtttcgctggcagcgttggcgtttccgctttctgatagcggggggaatgagttgctttgtgattttcttcggtatcctgtatttcggcatctctccgaatagcacttatgaaatgttatacctgcccttattctttcgtggcttgggaatgttgactttgattatagctttcgccttgtttgccgtagaagatttgaatccgaaattcttattgtcgaatgcattctttctgattattttccgttccgtattgacgcccattatggctacttcgttttatagcaatgtactgtaccggctggaacaaaaatatatgtattctttgtcggagactataacgactgccgacccactggcagcgtcacggtatagccaatctttgaacaacgcactggcgcaggggcacggaaatgccgaggcggcacaactggcaactaattctttatatactaccttgcaacagcaaagtctattgctcgcactgaaagaaatactgggctatctgctggttatatcaatcatcattgctgttgtttcccgttttattccgttccataagacactccgtgtcacatttaaaagaacgggtgacgatatggtttaatttgtccttcgcggattttgatgaatggtaatgtaatgattgttagtgaatttttatatctttatggcaaaatctaaaatatggagacaaagaaaataatctcaaaaaagaaaggctttttcgaactattgcttgtgactgatgggcaaggatatatgattgatcgatattgggaacgtggtggtatattcgttcttttactatttatattgtcagtactgccatattcatcgaaagcccagatgtcgtctgatagcctcgtccaaaaaatagccggatatatcgatgctatacagaattttggggatgtactgccgcaagaaaaagtctatttacactttgataataccagttattatcagggagatcctatttggtttcaatgctatgtcgtcacacccggactgaaccatccgacggagctaagtaaaacactctatgtagaattgttgaatcctggtggtgagataatttcaaaacgagtattacctatacggaacggtcgttgtcacagcagtttcgaattgacgcaacttcctttctattccggtttttatgaagtccgtgcctacacgaaatatatgttgaattttggggaggagattattttctcacgcgttcttcctgtttttgataaacctgctaatccgggtgaatataaagagaaaaatatacaaaagtatgcggtttacaagtatccgcagaccagaaagaaagcaatgaaggcaaaaaaggttaatttaaagttctttccagaaggaggaaatttggtaaaaggtgttccttcacaggttgcttttgaagcaactgatgcttacggaaatcccataacgctctttggtaggattatcaatcggagaaaagaagaaatcggtcattttgccactatacatgaagggcggggcgtatttacttatatacctaccggtgaagacgctgacaaagccgaagtggagcttggtggaaagaagtatcgctttgacttagtgaccgtagaacaaagaaagagttgctatccggttcaatacattattgaatagggatagcaactcttttttatctatatcggtgatctttttataaagtaacgcctgtcttgaagatagctatttcgcgataacctttcttttcattgttaacgaattcaccgctcgccactttgataacgtagtcgataaaacgttcgcaagtcttttccattggttcgttctcaacgattactcctgcattgaagtcaatccaacccggtttgttcttcgctagatttgaattggtggaaatcttcattgtcgggacaaaggtaccgaaaggcgtgccacgtccggtagtgaaaagtaccatgtgacatccgcaagcggcaagggtagtagcggctaccaggtcattgcccggagcagaaagcaggttaagtcctttcttttgcaggcgttcgccgtaaggcattacaccggacacataactcttaccacatttctgtgtacatcctaaggctttttcttccaatgtagagataccgccggctttgtttcccggagacggattttcaccaacaggctctccgtgtgacaggaagtattctttgaaatcattaatcaaatgtactgtctgttcgaacaagccttcgtctgaacaacgattcattaagatagtctctgcaccaaacatttccggcacttcggtcaggacactcgtaccgccttgtgcaatcaggaagtcggagaacatacccaatagcggattggctgtaatgccggagaaaccgtcggaaccaccacatttcagacccacacggagttcagacaaaggaacatcggtccgttcatctttggatactttggcatacaattcacgcagaatttccattccttcttcatattcatcacctactttttgagttaccatgaattttacacggtctttgtcgtactcacctagaaattcacggaatacatccggctggttattctcgcaccccagacctactaccaacaccgcacctgcattgggatgaagcaccatgtcacgaagaatctttttcgtattttcatggtcgtcgccaagctgtgagcagccgtagttatgtgggaaagcaacgattgcatccacgccttttcctgctgtttcacggcgcagtccttctgctaattgtccgataataccatttacgcaaccgacagtcggaatgatccatatttcatttcttacgccgacatcgccattcttgcggcggtagcctttgaaggttaagtctttatgagggatatccaaagagacctgaatcggattataggtatattccagtaatccggcgaggttcgttttgatattcgtttcgttcatccagtcgccttgtttctttgccattagggcgtgtccgataggatagccgtatttaatgacgttttcgccttcggagaagttctttaatgcgaatttgtgtcctgcggggatgtcttcatttaatgtaatctctattccatctacggagagatattctcctgccgggaggttaacaatggcaacggcaacgttgtcggcaggattaattcttaaatactttgtttccatgtacttgttagttggatttgtttttttgttgttatttgctatggtaataatcaatggtttctactgtcaacaagtcaattggcatatagttgatgcaggtcacttctttcttgaaaataaggtggtcgcaaagagctttaataccattgaaaccttgcaattccggttgctgggcaatgaggaaggaaacacttccttctttcaggcaggtgacattccgttcgagaagatcataacctatcaggttgaagtctttctttccgtgactttgcagatattcgcccacgatgtagactttggagttaaaagtaattccgttcttcactgtcgggtgggtgcggaagagttcatccagcatctcattgtcttcgtcgttgcgttcggcatgcaagtcgagctccagtatagtacaagacggatgatattcttccatgtactgcctgaatccgatttctctgttctcttgctggttagaaccgacaattccttcatgtattttacggaaaatgacgatttctttttcatctctggcgagcagcatcaacatccgtgcagcaaaatatccgctctgacgtgagttctggccgaagaaggcgaggggaggaacatccttgatattcgagtctatatatatataaggtatgtctagtgtgtgcagctggtcggtgaatcctttcgtatattgcggagcggtgggggccaccataactccgtccggttgaagagtgataatcgtttcgctggcatcaacaaaggaatgatagtcgtatgggtcgtaatagttgattttcaccgaggtattaaaatctgaataggtagcaatagcctcgtggatacccagttctacggcagtccagtattcaccttccaaatgttccggcaaaaggcagatgaacgtatatttcttattggaagccaacgcactggcatacatattaggctggtagtcaagctgttttagaatttcttccactcgtttcttacttgcttccgatactccgctacgactgtggatcacacggtctaccgttcctactgatacatctgccagacgcgcgatatctttaattctgattctttcgggcaatttattcatacgattaccttatttatataggtttttgtgctcgcacacaataataatcttaatattttcgatacaaatatataacaatttttgtaattacgaaaattgttgtatctttgtgcccgcacacgaaaggtgttgtatactatcctatttatggattaatagtcattatatcagtgtgttaagctcgaaaattagctaaaaatgataaattgaaagttcataatattaataacttagaatttaaaacataagattatgggaaagaaagtcgttacattaggcgaaatcatgcttagattatcaactccgggtaatactcgttttgttcaatctgattcttttgatgtagtatatggtggtggagaagcgaacgttgctgtaagctgtgccaactacggacatgacgcctatttcgtaactaaattgccgaaacacgaaattggacagtctgctgttaacgcattgcgtaagtatggtgtgaagacagactttattgctcgtggcggcgatcgtgtaggtatctactatcttgaaacaggtgcttctatgcgtcctagcaaggttatctatgaccgcgctcattctgctattgctgaagccgacgttgttgacttcgactttgacgctatcatggaaggcgctgactggttccattggtctggcatcactccggctatctctgacaaggctgccgaactgactcgtttggcttgtgaagctgcaaaacgtcatggtgtaactgtttctgttgacttgaatttccgtaagaaactgtggacaaaggaaaaagcgcagtctattatgaaaccgttgatgcagtttgtcgatgtatgtatcggtaacgaagaagatgcagaactttgcctgggcttcaaaccggatgcagacgttgaggccggtcacacagatgctgaaggctacaaaggtatctttcaacagatgatgaaagaattcggattcaaatatgttgtttctacattgcgcgaatctttctccgcaactcacaacggttggaaagctatgatttacaacggcgaagaattctatacttcaaaacgttatgatattgatccgattatcgaccgtgtaggtggtggtgactcattctccggtggtatcatccacggtttgatgactaaacctaatcagggcgaagctcttgaatttgcagtggctgcgtctgccttgaaacacactattaatggtgattttaaccttgtttccgtagaggaagtggaagcattggctggtggtgatgcaagcggccgtgtacagagataaagagataagttgaaagtttaaaaacaattcatttaaaataggagattaaaatggcaaaattcgataaaatagccgtattgaataaaatcggttctacaggaatggttcctgtattctatcacaaagatgcagaaattgcaaaaaaagtggtaaaggcttgttatgacggtggtgttcgtgcttttgagtttaccaatcgtggtgactttgcacaggaagtatttgctgaaatcgtaaaattcgcagcaaaagaatgtcctgaaatggcaatcggtatcggttctatcgttgatccggctactgccgctatgtatttgcaactgggtgctaacttcgtagtaggtccattgttcaatcctgaaattgctaaggtatgtaaccgtcgttcagtggcttatactccgggttgtggttctgtatcagaagttggtttcgctcaggaagtaggttgcgacctttgcaaagtattcccgggtgatgtttacggaacaaacttcgtgaaaggtttaatggctccgatgccatggtctaagttaatggtgacaggtggggtagaacctacaaaagaaaacctgacagcatggattaaggctggtgtattctgtgtaggcatggggtctaaattgttcccgaaagataaagtggcagcagaagactgggcttatgtaacagctaaatgcgaagaagctctcggctatattgctgaagctcgtaaataagattagagagcgaaagctgtctataataaaaaagaggctggtgagacagcctcttcaaaatatgcctcaaagggttagttagtttagttagtaatgaggcatattttcattttgtttaaaggtgtttaaaggggataggccatcggaatgagtgattcatttcggtggcttgttttttgttacttttcattaagaatgatgaggcaatcgcattttgatgacacgcccgacaataagagctataatatagaatacggcaaaaccgataatagaaaaaacgaatggcttttgttcattgaaggtacgtcgtggaggaatgacagtgtaagtttctgacgtaacctgattggttggctgtgtggcaggagagacctttagtgttgttcctgttgtttccatttgacagctatctgttgcagatattgtatcctctgttatttctgtaaacatatctttttccctttttatttgtatctgaattcttgtaattgttatcagttataacatagtacatagacttttgtttaagggagcaaagattgttgcaaaggtaattaaaaaagtaaatgatgaatcaaggggaggcattctttttaaaagatttgatgtaggtcaatttttaaggcctttctttcttgttgtcttttgataagagtgccatgtcgtgtgagttctttagagagttacacggataatatttgtaggcattatccgtgtagtagtgttagagtaacaattattcgggtacgtaaattatttccccgttatccaattcataggcgataccgactttcttgccacgtttcccttcttttttatcctggtcctccgaaggagtataccgattgattttttctccttctttggtgatgatttccatattttccttacccggatttttcaccatggtgaagtcttcttgcgagaatacctcagtcatgttgtagcggctgacaagggcaaccattaaagctactgcaaataccatagcaacgtcaaacaagttggatactacgctgatggggtcggagtcttcttcttttcgtaataggttatgtttcatttctcagtagttttagtagtacggttttcgttcagaagttcagcgataaattcgagattggtcatatcttgcagataccaacgttgcttaacctgctgtgtgagaaacccgacggcacctgctaccaatccgaccacggtcgtggcaaaggcaatctgcatattataagccatggaagcaatatctccgcttgccagtccggccagggcagggcccattggaatcaaagtacccattaatcctaagataggacctagtttggtcagcgtttttgagattgcaaggtctttgtcggctgcaatctcaaagttagccaataaacgttgtacttgtgcgggagtatcacgggcatccagtacctgacgcatatacataataacgagtgaacgcgacttttccggtaacttggaatttagttctcctactgtttcagaagttagtttccccagttcattgcggagcaaagcttctgttttgcgaatggacatatactgtccgtagaaactgcctgcaagtaacagtgcccggcagaagagaatgattaataatacgatgacaggaacaagtaatcctgttgaaatccaatataaaatatctgatataaagttcattgttgttgattatttaataggtaattgattctttttattgcttcatgcttttctgtttgtttctgttccgaaagttccaccagacaagaccgatgattccaccggccagagtgataaccaaaacgcctgccagtgcttgccagtctatttcgctgacacctgtcgccgaagttcttccgttgacggtggctacaattcctaggatagctaccagtgcattagtgaggaagaacaattcgaggcgtaattccttctccggtaacaaatagagcaataaatatctgccggaaggaattgctatcaggataaaaccggcataactccaggctattgtctgaaaggaaatgcccggaaaggcgaatatcaggtatattaacccgctgaatagaaccgggaaaatcaataatccaggaaaccagcggagaaagcggtacatcacaatcatacgaggtttgaccggataatcgttcgccacgtggacagccagcatggcgtaagccatttgcacgcagacctccacactaagcaatacagctgtatccaacatcaaaggttgattactaagccaatttgctatctgggttttagactgttcaatagcatacggccacattaatccggcaaacgcagcgcagatagcggcgataacacacaccgctattactttccaaaatgtttgcttcagcagaaaattaaatgctgtcagaagcataagtacaaggacaactgtattcatttttgctaattacaaattatgagttacaattacatttggctgcttttacggcgtttgcgtacaaagaggattaaagcaagtaggacaatgataacagcaataccgacagctacattgcttaatgtatttgtttgttcttcagtagtctggttcatttcttcttttttcatcactactcctttgtcatttccgcttgcttttgcttcacggattttggagatattctctttgtattgtgcggctgttggcgcatctgctttagaagcaatataatcgcgtagttttgcattgtcgcagacgaagcccgaacaggacggacgataattgttgactatctccgtatgtaacttactcaattctgctacttgttcttcgctggctttccataatcctttgcgggcactttcgagcatgacagccgtcatttcctcgagagcggcaggattctgttgttcaaagtatttctttactcccaggttaagctcgtcttttacatatacattatagatattatcccaaagttctttatcaatggcggcaggtttcatcacattccaaccataagtgttggtgataacttctgcaaattcactcgcagaagaagctcctcctttcattttctctttaatatagaccggattgagaatagtcgtacgactttctacaccgacagcttctttaagttcctgcattttcatgttattacgattgcgatagtcgctgaggtaagcgtccggatctttaccggtcacattgcgaacggcaagattcatgcctcccataaactcatatacatggtcaaggcttaaggcaccccaagtattgctttgacgtggctgtactactacatctgtacgtgtcaatgctgcttcaaaagcaaatttttggaaaacttcccagttcttttcactaccgtaataagctcccatattattgagataggtagtagcaagttccgattcattttcccaacggtcaccggattccaccatttcctgaataccggtaccgtacataccgtttattcctccgaatatgcggaaagttgaaatcccccgggcatctttcggactcaatcctttttctgtcaatacccgttcagcctcaattacacttgtcgctacttggttctcgtatttatcatctttggcaccggcagccatttctaccgcacgattaatcaggaaaagacgggaggcggcaaggtcacgaagttgtccggaggtctgaactaccacatcaatacgcggacgacccagttctgccgaaggaatcaattttaaatcgctgatacggccgaaagcatcacgaacaggttctacaccaagcatataaaggacttgagcaatcgttgctcccccggtctcgatgaactcggaggaccagagtgtatagcttactttccgtggtatagaatcgttatgacgttgtttgtacgtatcaatcgtttgtttggctaaagcaatccctttttcccatgccgattcagtaggagtcgcttcagcgttgatagcgtacatattgcgtccggtaggcaatgtattcggattagctatggggtcacctcccggggtaggggtggtgtagcctcctttcaatgcattcatcagactagccagttcttcttcaggacttgtcaaaagtgcatttttatagtttcctatattcttaatagtgcgttccacttctgtgacagccaaagaaaactctatatcttctttgctatactctttaggagcttttcccggatccatgttagtgcccattttcttcatggcttctttcatgctttcgggaattttctcatgaggggacttttcactttgctgtgcaggatgtcctcccattttcttgttcttatcatctttatcttgtttggctgcggcaaccatcatcatcgccatcattcctttcggagcattccggtcagcttctatttggcgtgctttagccagttcctgaggagcaattccggcagtacggcagatcagttcgtctgttgcctgtgcaggattggttatcagcttttctactaactggcgggcaggatttagatattgctgtgtaaaaagactccggtgtttgttgatagcgttcgttgcttttccacgttgcttgtcaagagccaaaaggctgtatgcgataggttctgttgccattgcgtaaacagaagaagtaatccgttccggttcatacggaacacccatagtataaagttgcccggtgattttttctgtagccaattcttcggcgaagttttctacacgggcgatttcatcctctgtataaggcttgttggtgatgctgtccagacctaaatcccggtggattcccatttttactgtcaatgctttgatggccagcgattcctgctctttattctcttttgcggagttattgtaaatcttgattttctccataagctcacgatagataccgcgcacgctactttcgaggaaaggaggagtaaggtaagattgcagtgtcgcatacgaacggcgttttgccatcattccttcacctacatttccgatagaatagagataaaagtgaggaacagctccgaccagacggtccggccagtcattgctgcatagggcaacttgttttttaggagtgaattccaaactgccatgtgttccgaaatgaatgagtgcatcagctttgaaaccgtgctgcatccataaataagaagcgatataagtatgcggaggagcagcattcgttccatgaactacctgaaaagaattgtctccacttcctgctgcattctgtggcattaatacgatattaccgaactgtaaccgggctacgcccaaacgtccgtccgaagtgaccatatagtttccgggaaactctccgtcggcagcaacgacttctgcatatttttcaggacgaagcgattctttcacccagctttcatattgttcttttgtaattaattccggatttccgtttttcatgaactcgtcaaaagctccctctgcatacgagttgaatactgcaccttgtgcttgtatcatttttgcaagttcttgtgcattggcaggaagtcctgacacattataaccttcctgtttcatgcgaagcaagagattgtagagcgaaggtactacttccattccggcagccgtcaaggcattttgtcccggtcctttgtaatagtagatagcaacctttttgtctttattgggctttgtttccagattcagatagttgttgatagtggaaacgaatgttttcagtcgttcgggaatggcgtatgagtggcgtaatccttctttgtcttcatattgtgcaaaaagggcaaaggggcggatagcaccatctatttccggtgtcacaatgctttgcgacataaaaccaccggacatacccaacggatcgttttcccattcattcacaaggctgttgatcgtgagtggggcaaaaagcagaatattcttagttttcagataatctaccattctatcccccatgcgtccgtgagccatattaataacagcgtcaggctgcacttcatcaataaacgacatgaatcttgtcattgactgaaccggataaacgttgtagccttctttttcgagagctttgatgaggtcggtagcatctgccatttgtccggtaattataattcttcgagctccttctttgtagaggttgttgtctttcataaatttctcatagtcggtaactgtgagaaattccagctcatcgtccggattactgattccggcatgatacaacatatcgctcggcctttctaccgggtcttccatttcagttgtggaatatgtttttccatcaatggctttacggatgtagttcaacatattcctgtagtttgtttttccgccattgctcagatagcggcgtatcagattctgttgtacactatcgaggttacagatattgttggtaggattggtggccattgatgtgtacacagggacacctttgtctgctgcctgctgtatttgctgacgctgttcttcaacgatacgcagtcccatgccgttaacaaataccatatcataatttgacaggcggtcgaggttggcaagcgatacttcgctgagtttgatgaatgaattgtcatttgctttcgatatgcttccctgctgtatggtctggaagttgacgaaagcaatctttgtggcgctgaaccaggcattccagatagatatgcctatcaggacggctgcaacgatgcacacacctaagatgattttacttttctttttcatttctcttatttttagctttgtatgtagttttattgttgtttattttttgaagaaccgatctatatccaacgaaagacctagtgtcagattagctcctgtcgtagtgggtgaattgaaataataataatccggtacatagttaaacaagttattaatagccagattcatattcacacctttgaatactcccaccgagaaggttaaatcccaaatcatatatcccgggtacgtaacagcagtgcttccggcagcagggttgttgaagctatcgttgtatacgtttgtttttacttctgacaagatgcgtccgttgagtgaataattgaaatctactttatctaggttttccccccagtctactcttacagttgccgtatgcgggcgcgtatctgtgaattttttctgcccgtcacgcataaattcatggatgtaagtgtatgacatacgaaatcctaatccacaggggtatttggcagagatgttagcgtccactcctgcaatgcctactttgtcggtattggtatatatttgtcctttgggatcatcgctgtaaactgtgttaatacggttgtgtaccagattataatatcctgttacagaaaaattgtaacggttttttgtgtactcggcagacagggagaagttgtggcttgtttctgatttaagatcaggatttccataaatcatcatcatgtttgccatattgaacaccatatacatttcttttaaagtcggtgagcggaatccttgtgaataagaacctctcaatgaacagttaccaatcttatacatcattcccaaatgcggggataaatgacgaacattggaatcggagaaataatcgaaccgtaatccggcgattacatttagtctttcagtcggattccagtcgaattgtccgaaagcatctgctgtatgcatgatatagttagcgttatcagtgaattggtaagacatcagataatcgcgaaggtaatcggctccgacagtcaacgtatgtttttcattgaaagtgtaattataaagagcgtgtacattatgctgcacattgctataatcacgtacatcatttttatagagtacctggtaatcacttttgtcatattggtcgaaagtgtaaccgacttcaagattacttaatgtgttgaatgtataatttgcttttagcccaccgttgaaatcccggtatctgtcttgagtgtctcccggtttattacgttcacggaaataatacccggctcttgcggtcagtttaagtgtttccaatgggtgatagatcagccgttccttgaagttccatactcggcttccgaatacagttgagaaatctcccggattatctacgccatacgtatctacattattatattgtacattggtcaggctgttgaatttacctgcattgaatcccacagtaccgccatatcgatggtcattgtgctcggagaagcgtgaattaagatttaaattccatgggtcatccgattcgcgtgtaatgatgttgataacccctccgatagcgcttgaaccgtaaagggtggatgctgcacctttcacaatctcgatgcgttctacattatcaaggttcagacggtcgtagtctacgttatttagcgtttcaccggccaaacgttccccgtctacaagaaataatacagagtttccgccgaagccttgcatattgatagaggtttgctggtccatagcaaaagtgaattcaatgccgggaagttcagtctttaacaagtcggctacattattggcatttacctttttaatatcttccgaggtaatcacccgtgtaatgataggtgcatctttcagcagtttgggagtacgggtaccggtaactactaccgttcctaagtcaaattgatcttcggatagacggaaacttagttttttgttttcgtccgttgtgaatttcttttctgctgtttgataacctacgtaagaggcggtaatgatatacacgccagttccgggtagttgcaatgtatatgttccgtcggatgtggtgacggctccagttccttttccttttatagagattgtggcgccgggaaggggtcccccgtttgtatcagttacacgtccgctgacataattactggattgttgtgcaaatgtggagcaagttgctataaaggaaaataataatattataaatgtaggtttcattctttgttattgttttcttagttattttcttcgaaatcaaatggatataggaagtcgaagtcgatgtatccctttatacctttggcattggtatagttggtaaaacgaatggctgcataggtgttgtctttcagtcgtatcaggtagacctgattggacattgtgtagataggtggcatagtcgaagtatctacattcagccaggtggataggatactgttataataagagtcggtatagacaatgtttccttccatcatgccggacatatcaatagcaattttgtccgttgtccattcatctttaacaaagtctttgtcatcaggcaattttccgcttgctttcagggcatcaaaacttgtgtagctcgtttggtaagctgccccttcattcgtttttatatcatagcgatgaatggcgatatcccaattatcgggtatttcgctttcatattctttcccgattttgactgtggtaactttacgaccggaaaaatcaatatatgcccactctgtgtactcaacagttttgatttgtgagaaactattttctttgatttccatttcagtttctgtgggggcgtcataaatattctcaaataatccattacaagctgagagcgacatagccgctcccagtatcattgtatatttaaaaatagtgttattgcttcttttcatttctttcatttagattgtttattctgcacttgctgtatcacttcctgtaaatactgtggaaatagctatcggcatactacccggcttgaagtcagtgttaatagtagcagtaccgtctgctgcgattgtaccgctcaggctttctcctgtgatagcttttccattgctgtcggtagattcatattctcccaggctgagtgaataggttccgtttgctccggctgttacattgactccactgatagtgaaattacctaaactcatatgaccaccggcacctgacaagttagcgaaaccgcttaaagtaatgtctaccgttgtgtccgatacacgtttgataacagctttacattcatcagttgtgccgtaggatgtatctccaacactgatagacaatgaactgttatactgataggtagcagctatattataagttatcggtgtttctccttgcatgaacacgatttccatttctcctatgggtgtcggaatatctacattagtcttcaaggttaacactttggattcatttacactaccttccagtgtgtagttataactactacctgtgccactgcccatggacatcaccacttcacctgaaccactgaaagatttcgaggaaagttttaaattattcaggcggaaatcacctgaaccggatttatataccaaattaatgctaccgtcttcgttaccggttattgttgcgctggattgatcgcccaacaaatagtctgagaacatatcgcattcaccgactgaatatccattataagtgccggcaatttcctttgcaagatttatatcgttgtcgtcaccgcaagaaacaaatgttgttgaaaatgatagtgccataagagcaactgtccaaaagtttaaaattttcatacttaatattgatagataatgattaataaatttttcagttgcaaaggtacggggaactgaaatgtggaaaaatacccaaaagaaatgaaaaagagttgagacgttaatcatatgtaggtattataaaaagtttgaaccaattcttttcactttggaatttgaaaatgaggaaatcacggctttttcatttaagctttgaattagtcgttcgattctcctacccatgccactgcggcatgaggggaaatcccgttattggtaatcactaatttacgaatatctcaaatctgaatttttctcatttttgagctggaaaatgtaacacgtcagtgaagcttactgatagtccccttattatctcagcgtgcgtgaataatctgcttttcttctggaatacttgacaaacgactttttattttgtatctttgaagaaataaaagtgataaatagcatgagtgatataagaaaaatagatacataaatagcattcagactgatatgttttagtatcaggatagatatgatatagggcaatagtctaacgattattgccctattttgtttgtatttttgcgcaaaacatttaatccatttccgaaaaacgaaaaaaatagtttttaataaactctgataccgtttataataaactatccaaaagtttattataaacagaaatcaagtttattaatattggaatagctggttgtaaaaataggaaaaactgtattatagagtagaggagcatcgataagcgcattcgtttacaaagtaatataagataacattttccatttcttccaaatatgcagagaattcaaaccgtcaacacaaggagatagtatcccgtcaaaaatgaacgataagaagaaacacctatggtgatgtttccgcatcgctgcgcacgaatataaggatttttactacaataacgagcgacgaacaatatttcttaaatgaaaaagccgtgtgaggaaatcacttgtaagatggaatgttgtgcggattgaaataaaatccgtacctttgcgcccttaaaactaactaacctttatttttatgtttactgacttgttgcactcctcttatttttcccttttcctgattgtcgcgttgggatttatgctgggaagagttaaaattaaggggttatctcttgatgtgtcggcggtaatctttatcgcacttcttttcgggcactttggcgtcatcattcccaaagaattgggaaatttcggtttggtactttttatttttactatcggtattcaggcaggacccggattcttcgattctttccgtagtaaggggaagacgttgattctcattactatgcttatcatttgttccgcctgtctcacggcggtaggactgaagtatgcgttcgacattgatactcccagtgtggtaggtctgattgccggagcattaaccagtacgccgggtttagccgtcgctattgacagtacacactcacctttggcttccattgcttacggtatcgcatatccgtttggagttatcggtgtgattttgtttgttaagctgctgcctaaaatcatgcgggtggacttggataaagaagcacgtcgcctggagatagaacgtcgtggacaattccctgaattgattacctgcatctatcgtatcactaattcaaacgtattcaaccgcagtctgatgcagattaatgctcgaggaatgacaggagctgttatttctcgtttgaaacatagtgatgaaatatctattcctactgcttctaccgtgttgcacgaaggagactatatacaagcagtaggtagcgaagaatcactaaatcaactcgcagtgctggtaggcgagcgtgaagaaggcgaacttcctttggataaaacacaggaaatagagtctttgttattgaccaaaaaggacatgataaacaagcaattgggggatttgaatttacagaaaaactttggttgcacagtgacccgtattcgtcgaagtggtattgatttatccccgtcgcctgatttggctttgaaattcggcgataagttaatggttgtgggagagaaagaaggacttaaaggtatagcccgcctactgggaaataatgcgaagaaattgtcggatacagacttcttcccgattgcaatggggattgtactgggagtgttgtttggcaaaataaatatctctttctccgaaagtctgtcattctcaccgggattgaccggaggtgtcctaatggtagctctcgtactgagtgcgatcggtaagacaggacctattatttggtctatgtcgggacctgccaatcagttgctgcgccaattagggctgcttcttttcttagccgaagtaggtacttctgccggaaaaaatctcgtagctacttttcaggaaagcgggctactgatgttcggtgtaggagcagccattactttggtgccgatgcttattgcaacagttgtggggcgtctgatatttaaaattagtttactcgatttgctgggaactatcaccggtggtatgacaagtacgcccggtctggctgctgccgattcaatggtagacagtaatattcccagtgtggcatacgcaacagtttatccgattgctatggtattcctgattctgtttatacaaatgatagcttcagccgtatattaacagtattctgtctgaaaattgattgttaaaaaaaaagtttgtatctttgccgtcctaaagtagaaatgagttgaaacgattgttactgaatataacgcactatttcttgccgatactttttgtatcgtatctggtaagccttacattctttgcccacgtacatgtggtcaatggcgtgacaatcgtccattcacacccgtttaagaaagggacggcacatgaacattcaacagtcgagctgatacatattcatttcctgtctcatctgacgacggacggtgcggctgttatttttgctctttctcttttcatcccttttttattgtgtctgttgttcggtcgtccacagcatacacattctcatgctccatatcatggagtgattgcactccgggcaccgcctgcgattcgtttttcagttatttagctgatgatattctgccttgtttgaggctgggtattgtctgatttttcatgtgaatacttaacgaagaacgaattataaacgaaaaatgaaaaaatacatattttcgcttgtctgcttgtgctgtgcattgttgcctgctcttgaaggacaagctgctcttcacgagcatcctgagtatccggaattgcgtaaatcggatgcgaatattgttggtcatatccttgataaaaatacaaaagaacatttgccctatattactattgctctgaaaggaacaacaatcggtactgtaaccgacgtaaccggacattatttcctgaagaaccttcccgaaggaaatttcgtacttgaagttagctctgtaggttataaaacggtgaggcggaatgtgaccttgaagaagggacatacgctggaggaagattttgaaatagaagaagatgcggtagcattggacggtgtcgttgtttctgccaatcgcaatgaaacaacccgtcgtttggcaccgacattggtgaatgttgtagatctgaaaatctttgagaataccaattcgacaactttagcacaaggactgaattttcagccgggagttcgcgtagaatccaattgtcagaactgtggcttccagcaggtacgtatcaatggactggacggtccttatacacaaatcctgctggattctcgtcctatcttcagtgcactttccggagtatatggcatcgaacagattcctgccagcatgattgaacgtgtggaagtgatgcgcggaggtggttcggcgttgttcggttcgtctgctattgcaggtacaatcaatatcatcacgaaggagccgattcgtaattcgggtatgttgtcgcatactattactgggattggcgacggtgacgcttttgataacagtacagcattgaatgcctcactggtgacggatgaccagcgtgcaggtttatatatcttcggtcagaaccgtcatcggtcggcgtatgaccatgacggagatggatattcggaaataccgaagatacacgggcaaacggtcggtttccgttctttcctgaagacaactacttattccaaattgactttcgaatatcatcacatggaagaattccgtagaggaggagatatgctcaaccgtccgcctcatgaagcgaatgtggctgagcagacagagcattctatcaatggtggtggtatgaagttcgattatttctcgcctgacgagaaacaccgtttcaatgtattcgcatctgcgcaacatatcaatcgcgacagctattatggaggtgggcaggacccgaatgcttacggaaacactactgacctaaattggatggcaggctcacaatatgtttacagctttggtaaatgtattttcatgccttctgattttactgccggagtggaatttaatcaggacaaactggaagacaatatgtggggatacaaccgtacggtagatcagaaagtaaatatcggtagtgctttcgtacaaaacgaatggaagaatgatcgttggggatttttgctcggaggtcgttttgataaacataacctgatagatcatctcattttcagtccccgtgccaatctgcggttcaatccgaccaaggatatcaatcttcgtttgagttattcatccggtttccgagctccccaggcttttgatgaggatttgcacgtagaaaatgtaggtggtaaagtagcaatgattgaacttgctgataatctgaaagaagaaagatctcagagtttgagtgcttctgcggatgtttatcggcgttttggcgcttttcagataaacttcctgattgaaggattctatactaaattatcagatgtctttgctcttaccgacggcgaagttgtagacggagttctgatacgtacacgtcataatgcaccgggagctcgggtaatgggacttacattggagggaaaaatggcttatctgaataaattccagattcaggcaggggtaactctgcaacagagtcattacagtgaaccgcatacgtggaataaggacgcaccggcagtaaagaaaatgatgcgcacacctaacacttatggctatttcacagcaacctatacaccgataaagccgttatccattgcgctttcgggtacatataccggttcaatgctggttcctcacgagccagtccccggattccttgagaacccgattacggtgaatacaaaagatttctttgatataggtttaaaggcggcttatgattttaaactttataaatcaatgaatctccagataaatgctggcatacagaatatcttcaatgcttatcaggatgactttgataaaggtgcagatcgtgactctggttatatttacggcccgtcactgccgagaagtttttttgcgggagtaaagattagctattaataatggtttaataattcttttaagctctgaaatcgtcataaatggggattgttcggatataaaacaatccctatctttgtttcgcagaaaacgctattgtttttgttacacaaaactaacgaatgagacaactgtatcggaatataataaagttttttctgcctgtactatttatttcgtacatggcagggattactttgtttactcactctcatgtagtaaacggggttacaattgtccactcacatccttttaagaagggcaccgaacacaatcacacgacagtcgagtttcagttacttcatctattgaaccaagtgttggtgacagatagcgggttattacctatatttgttgtttccgttttatcattattatgtattcttcttattcgtccgcaaggtgcgtgttattgccggtcttgtccgggtgttgtctctcttagggcacctcctgtcccttagtctacatttatcgaaattgctatttatttttagaaacagtacttattattgtttccgtttcctttattactttctgaatttaaacgattaaaagactaacgacaatgaagaaatatctattagtcctggtcagcctatgctgtgtcttatcggccgcattcgctgagaatccggattaccctgagctgaaaaaatctgatgcaaatattatcggtcatgtattggataaaaagacgaaagaacatttgccttatattacagtcgcactgaaaggcactacgataggaactgtgactgatgcaaccgggcattattttctgaagaacctgccggaaggtagctttgttctcgaagtgagttcagttggctataaaacacttactcgcaacgttaccctgaagagaggaaagacattagaggaagattttgaaatagaagaagatgcgatcgctttagacggagtggtggtttctgccaatcgcagtgaaacgactcggcgtctggctccgactttggtcaatgttgttgatttgaaactttttgaaacgactaattcttcaactctgtcgcagggattgaacttccaacccggtgtccgtgtagaaacaaactgccagaattgtggtttccagcaagtccgtatcaatggtttggacgggccttatacgcagatattgattgattcgcgtcctgtgttcagcgctctttcgggagtatacgggttggagcagattcctgccagtatgattgagcgagtagaggtcatgcgtgggggaggatcagccttgttcggctcttcagccattgctggaacaattaatatcattacgaaggaacctttacgtaactccggtcagttgtcgcataccattacttctgtcggaggaagttcctcgtttgataataacacatcgttgaatgcttctttggtgactgacgatcatcgtgcgggattgtatattttcggacaaaaccgtcatcggtccggatatgactatgacggcgacggatttacagaacttcctgaattgaagaatcaaacagtcggtttccgttcttatctgaagacaagtacatattcaaagttgacattcgaatatcaccatatgcaggagtttcgccggggtggggatatgttggaccgtccacctcacgaagcccatattgcggagcagttacaacattcgatagacggcgggagtttgaaatatgattatttctcaccaaatgaaaagaatcgtctgagtatcttcgcgtcggctgccaatacagaccgtgacagttattacggtcccgggaatgaccctctcaaagcatacggaaagacaacagaccttattgctatggggggtgcccaatacgtacatacgtttgataaatgtcttttcatgccttccgatctcactgcgggacttgaatacaaccgtgaccggctgaaagataatatgtggggatacgatcgtcatacggatcagacagtgaatatttacagcgccttcctgcaaaatgagtggaagaatgaacgctggagtattttggtcggaggacgtctcgataaacataatatggtagataatatcatttttagcccacgtgccaatttgcgctttaatcctacgcagaatatcaacttgcgtttgagttattcttccggttttcgtgctcctcaggcttttgatgaggatatgcatattgaaaatgtaggtggaactgttgccatgattgaacgggcgaagaatctgaaggaagagaagtcgcagagttttagtgcatccgcagatatctatcatcgttttggcgcttttcagactaattttctgatagaaggattctacacaaaactgacagatgtctttgtgctgggtgaaccttataatcgtggagacggtgttctggtgaaattacgtagtaatggtccgggtgccaaagtagtgggggtaacgctggaagggaaactggcttatctttccttgttgcaagtacaggcaggattgacattgcagcgtagccgatatgatgaaccgcataagtggcatgatgatgtgcctgccaagaggacgattttccgtactcccaatgtgtatggctatttcaccgctacctatattccgattaaacctttatcaatagccttgtcaggtacatatactggtagtatgtttgtgcaacgcatggatattacagccaaaaatgctgcaatgggtgatatgcccgaacgaaaagcggaagctgttaaaactccgaagttcttagatttgggcgtgaaacttgcttatgactttaaattatataaaacagttgatttacaacttagcggtggtgttcagaatattttggaagcctatcagaaagattttgatagaggagcaaaccgtgattccggctatatctatggtcccgcactgccgagaagtttttttgcaggagtgaagattagctattaaaacagtgtataaaagatttgtctccagataaacatatataaaaaacagctttcatttttcatatccgcaaaatgaaagctgttattattctagtaagaaggcagagtcaatgattgcaaacctttgtgatatctacggtaaaaccttcatcggtagacataaacttacctttcatcttgagaaactctataagttcatcaatatccatattttctgccgaacaagtatagaagcgttgatcttctccgaacttttcaataattgccttctttaatgatgattctgagtaactattacctttcatcatgtgaaggacttcatgagcatgtaattgttccataatctatttttttgcaaagataatacgggcatatagattaaaactgtaacatatgtgacaaaggtcaattatatctattaattatggtttatttattgttttttcgaccatatctttatctattccgaatttttcatttgtctggcattcaccggcaggttctacgtgtacaagaatgtcataaacgttatctatggaactttttatgcttttttccaccgattctgcaatctcatgggcttgtgtgatggtaatttgtggattaacctctatatcgagggtaatcatataaagattccctatcattcttgaccttacacggtgcgggttgcttgcgccggggacttcctctacggcttcaaagatcttgttatatacattcacatctttaacaccgtccattagttcgacattagaatcaataaagatactgacagacgattttataataaagagactgattattaatcctgtgattgaatcgagtatcggtagtttgaatataaaggtaaagaccagtcctaccaaaactccggatgaaataataacatcattacgcatattgatcgcatttgctgtcagtaaagagctatcaattctctttccttgtttatactgatacagggccagcaagagctttccaatgatagagaatacagtaacatatatcgcaatagccgaaggaacctcttttgttgcatccgaaaagatgttggcaacggaggataacaacatttgcataccggcataaaatattacgagcgacaggattttggttgcgattccttccgctttctcatagccgaatacatacttttttgaaggtgggcggttcatgatgcgtgcagtgaaaatcattacgatagagatgattacatcggttgccgaatcaataccgtcaccgagtacagccaaactgcctgcaaataatccgacaatgatttttgatgcggaaagtatggcgttgccaattgtacttacccaggaagttctgattaatattttctctcgtgacatataattactatgtttatgaagcgaatatatattattttataatactgaccctcatattgttctttttattatcataatttgatatgtgagaggacatgaaatctaataaatcactataatctttctttctccttttagtagtttggatgttttagttgtattatatatagacagtcaattaaaacaagacattaacccataaatagttagcctttatgttcaaaaaattaagtacctctctgctgatagtattagcttatgttttatactcatgcacatctgccgtcaggcaagagattgccattttacctactcccgttaatttaatggaacagtcagtcagttttgtctttagagatgagatgaagaatacttcctgcctatagagagaaagattgtgaagcctgctgatattctcagaatggcaatttgtcactcaacaaggtaaatagttctcgccttggagtataggctttgaattgttcttgctgttgagtcataacgttgcttattgttagtttgttgttgagcgaatcgtttcttggtataacaagtttccattggaaaacgtttctccgattatctgtctttttagaaacgattctgctcggtacaaactacatacaaacaaagcttacaaagccaaagttatcttttaaacagcaatcttaatacctctttttttgttgcaatagcgtttgcattgctggcaaagatcatatcccagcattgttcctaaaatgaaatcttcttcagctgtcaattgatttaaaggacgagtgataatatgtcgcatagcttccatacattcgggtttaccaaaaaacaggttgattttattagtacttatctcctgtatcatatagctgatgttttggttcttcaaccggcgcacggcaaagtcttcatgttctttactcattgtataaagtaccatgttacgtatacctttcttaaactcataaatatgattgaggaaaatccggatttcaccgggaatgattcttttggtagccatgatgcaaacaattgtttatattaaggtaaaggttagcttatttcttgttttacttgttcagcccatgcactgatacgttcctctgtctgattgtcttcgttgacttcatcaattggaagtccgacaaatttgccgtctacgaccgctatggaagaatcgaatgtgtatccggccgtatctactgctccgcagaatttgcaatgcgtgtctttcaggtcttcataaataatcccgatggcatcgcagaatgtatcgctatatgagtcggaatcaccgcaaccgaacaaggctacatatttatgagacaaatcgcatttctttaaaacatttactccgtcataccaatcgtcttgcagttcgccggctccccaagtagagctgcctagcacaagtacatcatactcattgactaaagcctctgtaagtttagatacttcaaaaatatgtgcggaagaaacatttagtttctctgcaattcgacgggcgacgtcttcggttgttccggttgtggaaccataaaatactccaattttattcatctttgatatttttttaatgtgatgctgcaaagatagggtaccttgtagaaatagaaaatccctattaataatggaataatagtctcattctcatcataagtggggataaaataactatgttttttgatacttttatttaaaatagctatctttgggtcgatcaaaacaaacattatatgaatatgagaaatttaaagtatttttcttttggaatcatcagtctgattttcgcttcatgtatagaagaaaaaaacttatctattcagaatgaggaagatatggaaaatgcagaacttggtttatctacagatttttctctaaaaacagagaggagcatatctattactgctactgacggagaaggaaaaacacagaaaggtgtaaaaatggggatatttgcaagtcaaccttacacgggagaaggaattatctctgtcgaacctatttttgttggatatacagatgcttccggtaaattgaatgcggatgtagtcgtcgccaataatctttctaaagtctttgttgctccacttactgcaggatatgggcaggtgcaggaagtggatgtacggaatgttagctcattaaattttcgtggagttgctttcccgcaggctgctactgtgactcgtgctgctgcagatgaaattccacagatttttggtccaatcagcggcctttatcaattatttattccttataaaaatgacgaagtgaatgagaatggtatacctgttcagggaggttgctcgttggtgtcaaaagaacaactttctccggcattgattaataagattgatagttggtatccggaaaaaaagaatgttcagacagcggatttatcaaagaattctgatttgagaattgttgatgaggacggagctcaggtttgggtgacttatgttggagacggtggtttctgtgtggataatcaaactgtttataattcattgctgtattataattataaagagggagatttaaaaagtgatgtttataaacttcacatgactatgttactgcctaatacaaatcagttgcaatgtccgtcaggcttaaaagttcagttgctttattgggatggctcgaaatatagtaaggtttttccaaatggtacacgaatcgggtttgccgttgcgcgtgccggatttaagaaagacggtactgctataacagataaacttgcatatagttttaagaatacgatgagtcctgccgttaatggggatgtgaatggaatgtattactctactccagaattgaatacatggggcaaaactcaagcagtaactcgtgaattggacggctataattgttgtgtgacaggttttgatatccgtccttttggagacaggaaggctgattatgatttcaatgatgtaatggtaaaggtaacggctactcctgaaaaagctattaggccgggtgaagatattccagttgatgaagatgtgactgtggctgaatcaattcatggtacgttagctttcgaagatcaatggcctaatcccggtgattatgatttaaatgactttgtagtgaactatacatatagtgtctataaaaatgtggataataaaattaacggtatccaaatgcggtttagaccgattgctaagggtgcggcaagttatacaaaaattggttttgggatagaactaccgttggcttcgaatgatattgatgtagcagaagtagagggagctattttagaaagtggagactcaaacgctactttcattatttgggaagatataagtaaaccttttgctggtggtgaaacaggttttatcaatacagaaaaaggctcttcttttgtttcggcagaagagttggttgtgactatcccattaaaagcagtaactagtaatgtttctatgatgaagtttaatccgtttatatttgtcaataagcgttcgcatgagattcatttaacggattttgctccgacatcaaaaatggatatgaatttgttgggaaacgggaaagattgttcggatgtatcgaaaggtatttatttccgaatgaaagatatgtattgttgggcattggattttccacgaacttctgcagatgaagcggcatggagatatccgaaagaaaaatcatcagtggtaaaagcttataagaattacaataaatgggtaacaaacaagacagatttatcttggtttgactctactattccgggtaatgtagatggaagtgaattgtattaatctgttttgataataagttaataaataaggggctgcctcaaaaagcagccccttatttattaactatgttttttaatggtggaataaacgaattcctgtaaatgccattgccatattatatttgtcgcaagtgctgataacatggtcgtcgcgtacagaaccacccggctgtgctatgtagctgacgccgctcttatgtgctcgttcgatgttatctccaaaggggaagaaagcgtctgaacccaaagatactcctgtcattgtgttcaaccatgcacgtttttcttcgcgagtcagtacttccggtttttcagtgaaaaactgttgccatatgccgtctgctaatacatcatcataatcttctgatatgtatatatcaatcgtattgtcacggtctgcacgacggattttttcaatccaaggcaggttcatcactttcggatgttggcgtagataccagatgtctgctttatttccggcgagacgtgtgcaatgaatacgtgactgctgtccggcgccaatgccgatagcctgtccgtctttagcataacatacagagttggattgcgtatattttaaagtgattaaagcaataatcaaatcacgttttgcatcggcaggaattacttgattctgtgtcggcatttctttcaaaagactttcgtcaattttcagttcgtttcttccctgttcgaagattatgccgaaaacatctttgtgttcaatagaatccggacgataagccggatctattttgattacattgtatgtaccttttctcttgtttttgagaatttccaatgcttcgggagtataatccggagcaatcacaccgtcagatacttcacgattaataaggcgtgcagtttcttcgtcacaggtatcggacaatgcgatgaaatctccatacgacgacatacggtcggcaccacgtgcgcgtgcataggcggtggctaatggggacaacttcacatcatctacaaaataaatctttttgagtgtatcattcatttccactgcaacggcagcgccggctggacttacatgcttaaaggaagcggcagccggtagcctggtagcttcttttagctctttcactaactgccaactgttgaatgcatccaacagattaatataaccgggacgtccgttcagtacttcaatggggagttcgccgtccttcatgaaaatacgggcaggcttttggttagggttgcagccgtatttcagttcgagttcgtttgccatatcactttaattataaattactaattacaatttaatagcgacaaaattactaaaaaaagagtagccagcctaaactcctgttagaaattactagcatataattagtatttagtaatccgtaattaattgaaatacctataaatggtgattgtatttccgtgaaatattccgtttctttgcagtatctaaacataaataggtataaatggataatttacagaaatataaaccaaccgataagatgattgatcttatcagtgataactattctttgttgcaagtgatgagtcgtttcggactttcgttgggatttggtgataaaacggtcaaagaagtttgtgaacttaacggagtagactgtcggacttttcttattgttgtcaactttatagctgaaggtttttcccggttggatggagatgacggagaaatttccattccaggattgatagattatctgcgtcaggcgcatatttattttcttgatttctcccttcccgctattcgtcgtaaactgattgaagcgatagactgttctcaggatgatgtcgcttttcttattctcaaattcttcgatgaatatacaagggaggtgcgcaagcacatggattatgaagaaaaaacagtgtttaagtatgtggatttactgattaaaggggatgctcctaaaaactaccagatcagtacgttctctaagcatcatgatcaagtaggggagaagttgacagaactgaaaaatatcataattaaatattgccctgccaaggcgaacgaaaatttgctgaatgcagccctttttgatatttatgcttgtgaggcgggattggaatcccattgcaaggttgaagattatatttttgttcctgccattctgaagttggaaaggaggataagagaaaatgaaaaataacgaagttattcgaatagccattgcagaaacttctgtaattattcgtggaggactgactgcggcattgaaacgtcttcctaatgcaaaggtgcagccaatagagttactttctgctgaggctttgcatgattgcttgcggacacaatgccctgaaatgttgattgtaaatccgacttttggcgattattttgacgtaaataagttccgggaagaagtatctggcaaaaagatacgtttgatagcattggtcacttcttttgtggatgcttcattgctaagtaagtatgacgagtcgatctccatattcgatgatctggaaattctttccaagaaaattgccggtttgttggatatgtcttcggaagaggatgaagtggatagtcaggacgcacttagccaacgggagaaagagattgtgatctgtgtggtaaaaggtatgactaataaagaaattgcggaaaaattgtttttatcgattcatacagtgattactcaccggaggaatattagcaaaaaattgcaaatacacagtgcagctggtctgactatctatgctattgtaaataagctggttacgcttagcgatgtgaaagatttgtaactactgaaagtgttataaaacacaaaaccgtttgcgtacacgaaaatatttcgtacctttgcagtgcagttgagaaactgttagtttataaggtaaaagaaaaaggttaaaggtattagatttgacaatttaaggtattaatggttttagttcaataggaaaagttttaatagaaggtaaaaggataacgataggtaacacgtttttaggtaaaaagaagattagttttcaggaaaaaagaggtaatgagaagaaaagcccccaaaggcttttctgatgcgaggcgagtggttccatagaaggaattagctcgtttttttattttgggaacagattaacggagttatgtttcctgattaataaaacctaaagtctgtgtaatctgtgcttaaaacaaaaacaaaatcccgacgaaatcgcttcggcgggactctatttcatttttacttaaatgtggctacgtaataaaattatgactaattaattcaattctgatactgcaaagataaagcgtttcagtgggtgtcacaatcacctttatgaggtatattgcgtagctattctcactatttataattaccggatactgttttttccacctttttccattcttttgtttcaaaatcataggttttgataacttttgcaggacatccggcacatatagaataggaaggtacggaatggctgactacgcttccggcagctactacacagtgcttccctaaagttactcctggaagaataactgagttagcgcctacccatacgtcatcttcaataacaacgggctgtgtgttgaccccttgttcgtcgatcatctttttcacatcctgataattatgattgagtcctgttacggtcacattttgggctagattaacgtgattgccgatattgaccggacctataatcgtatttcttaatccgacacgggtataatctccgatagtcaaatcaccaactgcattattaaggcaggagaaatcttcaaccacagaatattttcctaaaaagaaatggttgaaaggaggaagatctttgcgtacactccgatagatcacagagccttttccgcgtttcaggtagatgaaatcaaagaggcgtatccaccagtttggacgagttttgacaggatgcataataagccgatacactgcttgctttaaactgggtttttctttaattcgttgcttaaatgtctttttctccatattgaatgttttttctttttgtcttccaccaaatagtccggaatagccagactataagtaactagtaggccgaagagtataagccaccagccgatagataatgcccggttatatcctgtaatcagcaatgtccatacactgacgaagatacacatttttagcggagaaggtattagatgctgtactattcggttacagaaattccagtttccttccaaaagcgaagggaagaaataagaggctgtctttcggaggcgtctcctatatgggtgaaccggacttgattgacagtatacaatagcatccggaaggtagtcaatatatacattcttccgaaataacttccgttcgatattggttttagagcttctcagattgttttgcaaccattccaagtcgatagccatattggttccggataagttagacgacagtccgaattgtgtatttccagctctgaaaaggctgttctttatttctttgcatatagcacggaaacgattacagaaacctttgcgattttcaataactgtgtgtaattgaatggcttgtattccggcatcatacgcattgtagattttctccagaaagagtggagacagagaaatggctgtgtttgataagataaggatcagttgatagtgttctctgtcaagagtattgattccttgatgcaaatcattgtatgtgaagaattcgtaagattcttcacgatagattacgggaagcggactttcttccggaacgaggatagcacaatggtatttcttttcagcttttggatagacaatgcgcttgaagtgcgatgcaactgccaatacaaagaggtatagaataacaatccccacgaagaagaataccaggtcatctattatgtaaatgtaggtgctcatcgtctgtaaaaggttatacgttctctttttgaataaatgcagtaactgttttcagaataattttgatgtccaaccagaaagagaatgtctttgcatacttgatatccaactgtttgcgttcttccgcagataacttgccggcttcacctcttttttctacttgccatagcccggtaagtcctgccggtcccataaagcggtcgatatgttcatcactagttagtaattcggcttcgtagagtgggagagggcgattacctactatggacatatctccttttaagatattaataagctgtggtaattcgtcaatactatatttacgaatgaagcgccctatcttcgttattctaggatcattttccaacttgacaaaagcattacttttctctttcgattttttgtgaatataatcttcttcggaaataacgaaatcatcagatatcaggagaatttcttcttcgtccactttttgaatttcttcggtctcttgctcttctccccaaatatcttcttcttgttcttcctcttgctgatactggttgagcgtattgaaatccttcaaatgtttgtcggcatcggtatacatggaccgaaatttgagaaaatcaaaaatcagataattgcttcctacacgtttggatttgtaaataataggacctttgctttctaggcggatagccagtgctgtgagtatgagaagtggggaaagacataacaatgccattcctgaaaagacgatatcaaaagctcttttccataaaggtaggcggaaagcattcaagttttgcgtcttgagttgaagtgcctgtatcttttgatcttttctatgtttcaggaaggttgacagagcctgcaaggattccggattcgtttcgtatttaatggtattatttataccggctttgagatattctggagcttcttctttagataaagaatcaatgacgagtaccatataaagtcccggatactttttgcgcatataatgaatatttgcaatatcttgggatagatttatctgttcgaaaaacagagctgtatcgtatttttcccgtatcttgtctagtaccttaattgcttgattacaattagatgctgcataaaatacccctatgctaagtttagagaataggtttatagtcttgctatctttgcctatgtaaacaaaatattgcatatagaggatctggtgttaatcgataatctttttgattcgaattttgagttctagtggattgaatggctttaaaatataatcttccgctccttcttccagcaatctgattctttcggttgtactttcttcactagataacataacgataggtattgacttgaataactcgttatttttcatatatcttagaaattcgtcacctgtcattaacggcatacggatgtctgaaatgataagatcaggtacgttaccttcattcagccattctattgctttaatgggatcttccaaataggtaaaatcataatccttacctaggtatataccggcaacttttccaatagtcgctttatcatcgactagtaatatttttttcttcatacgaatagacctttctatcgcttgctttgttattgatttatagattagcttactgtcacagattatttatgacagtttgcaaatatagatattattttagaataatctctcaatattgacaagtaaaattcgtgatatatatttattttatctaataaatttctcagtgcgatgttctaatagaaaaacacggatttcatattgatgaaatccgtgttatcaataaatatttggttgttatttgtacactttagatgaatcgaatgttttccaccattcctgattcttaacaccaccgctagttacccaatctgtaaacaaggaataaacagtttttatatttacatactctaaagtccacttgaagtcagtagggaccatgattccccatgccagattgtctttactgatgtaatatttcttaccggaaacagaactattatcattatttcctccaaataaatcagtattagctagtttggttggttgatagccgataacatgaatttctttacgattatttctatttccttccacaaaaatgaaaacattcagtttgttgatgtttaattcatccggagaaatcggattgctgagttttatggtgaaactgatgttcttaacattcgtattgtttgaatgattggcaaaggtgttaatttgttcataccgatctcttcccaatgctttgtgcgcatcgtcgaataacggaataactgcataatcttgtccgttctcaatcttattactgttcaggttgaagcttttgataagagagttgtcactaaattcaacaggttgcataattgcgctggcaggaacaccgtccaacatgatagcagctccaatacttttagtagctccggtagcggctaaatcgatgcttaatttgaattcttccactttattattcttattgagagaaatcgttctttctttgataatcatgactaaatcattcatatcatagtctccatataatggccattgatcttcaaataaatatgcataattatgtgtatcatccactatgatcgggaatttaggttcctctggttcttctcccttatttccttcgttctttgttcctgtacaaacttcgatagttactttggattctcctatttttgtaatatatgcgccgttctgtacatgaaaattagtccaatgtggacttttctctacatgattatctgattcaatagccaaattgccgtcataagtaaatccttgaccggctataatgggagattttatcatagaggtgttttcaccttttccatagaacgtagcataaccaggaggtatatccagtcttgtagttgcttccagcatagagccgttattcaagttaacaactccgttttggaactccattttaggtgccttgatatatccttgggttaagtttaacttaattccgtttgcgtagaaggaaatagtggcttccatactgcaactattgttgacggtaggattagtgaaactgatcgtctcaaaaatgattatatttttgtttgtgataacagcatctgagtttgcaatcattttttttccataaatctctccgttattttctaatgagaaattagacggaaggttaaactctccttcaagttcaatcttattgtcgttgataatttgggtatttgaattaattgctatgtccttgcttgttatagtacctccgttgtagagtgtagctcccgaatgtaatgtcatagtgtttgtaactgatacattaccccagtttcttaatgccgcaggtgctccgttagtaaatgatatattttcggcttcaacgtttccttcatccatgacagtcagcatggagtttcttataaaagtcatcactccggatgcttttattttagcattgtccataactatgatttcaataccattctggaactggaatgtagtcggaattgtccatgttgcatcaacgtaaactttggttttaatctcaccgtcatatccgtcaaatttgaatgtaccgttatagtcagaggtaattttataggaagcgtcacgcagtaaagttgttccttgcatttctgtaatttcttttgcttcacttggtatggaagtataaaccggtttctcgggtgaaacagctcttgtggtagcggtacggctcattaacactctgttttgagcagcagattcttgatagtagagtttacaggtaaagttgtcattatcttccggcacatcaaacagatatacctctacacgtcctctgggatcagtctgctttatataaatacctttttgcgtaggtagcagagtgatagcagctgtagctttaaagttattctctttatttgctgtccttgtagccagtacagatgcgttttcattagtaagaggatcttctgtatatatttctactaagtaggaatataaccctccttcttcatctttaacttcgactgtgacattttctgttttgattgtgctccaatcaaaaccatcaggagcagcaaaaccgtctcccattgggttggacgtttcgtaggagggatcatacaaatccttccccgagtcaacacaactaaacaggatacctcccattgctattgcaatgattggcatgaaatgaattgtttttttcatcataattaatattgcttgattgtttgtaaccaaaatctaatgcaaaaatagccgcatgtcttatatttaggctgtattttctgttattttatgtaggaaaaacaattgaatttccgtttcggttctattttagctctagtaggtgcgattaagactttttatatgataagaaatcccttgattttcaaatctacagatatatcagatttgagaatcaaaggattataataatcgaatgggtgtcttaagacttggtgatttctcctattaaacaggagttcattttgtatcgtatatctttgttgggcagtccgtgtcctaatagaaacattagttttgttatagcacattcaggggtactgtcgtatccgctgataacacctgcttccaagagatgcattccggtttcgtaacgtcccatttcgactgctccggaagcacattgggtgatgttgacaatgataatgcctcgttcagtagcctcctttaattgacggataaaccattctttttgcggtgcatttcctgaaccgaaagttttcattaccacagcttttaatccgggaacatgaaggagtgaagttacaatactctcttgaataccagggaaaagggttaaaataaccacattgttatcaaataagtaatgcggctttaacggcttcgtagggtctggtttacgaatgaggttgggctcgtatttaatgtgtatgccaactcgtgccaaaggcgggtaattgaaagagcgaaaagcattaaagttttctgcattgattttggtggtacgattaccacgcatcagatgattttcaaagaaaatgcatacctccggaacgatagcagtgccatccggattttttgcagcagcgatttcaatagcagtgatgagattttctttcccgtctgtacgcaaagttccgatagggagttgggagccggtgaggatcacaggcttactcagattctcaagcataaaacttaaggcggaggctgtatatgccattgtatctgttccgtgaaggatcacaaaaccgtcgaaataatcataattgtaattgatgatttttaccagttttgcccagtaagcaggctccatgtccgaagaatcgataggaggattaaattgataggaggaaatgcgatagttgaatctttttagctcaggaacgtgcttgagcagatgatcgaaattaaagttttctagcgcaccagtttctgggttttctatcattccgatagttccacccgtgtaaattaacaaaacggaaggagtttctgctctcataattgttgaattactgttaaaacgctgacaaagatatagattaattgcgaattatggatagtaaatgataaatttgtttgtattttagcgtaaaatgttataatattgaatatttatgcggatgtatgctaggaattaaaaggaaaagcagggtaagtagctaaagtagtaactacttactcctgattacttctataaacttacttcagtgcttctttcagtttgagaatagctttttccgggtctttttcttcttcgagcagggtgacgaatcgactacctataatagctcctgaagcatgttcgcaggcagcctggaaagttgccttgttagaaattccgaatcctaccattaatgggttttttagatgcatatcttcaatcttcttgaagtataaccgtttttgttcattgaaatcctgttgagctccggtagtggctgccgatgaaaccatataaatgaatccgtctgtatgtgcatcaatctcacgtacacgttcttcgctggtttcgggggtgataagcataatcactttaatgccgtaacgttcggtaatgatgcgatagcgttcctggtaatcatggaagggaaggtcaggaataataacaccgtcgattccgcactccacgcatttgcgacagaaattttcgaatccgaactgcataatcgggtttaaatagcccattaatactaatgggatttttacatcccggcggatgttacgtaattgttcaaaaagtacctttagggacattccgttgcgtaatgcttgagttgcggcattttgaatgacaataccgtctgccattgggtcactgaaggggattccgacttcgatcatgctgacaccatgcttttcgagggtacggatcacatcggcagtaccgtccaaagttggatcacctgcacaaaaataaatggaaagtaaatctttcttattgctattgaagagttggttaattctgttcatgactttaaaaaattaaatttatcattttagttcatttaaaaatgtccggattcgtaccggatcttttttccccggttccaattcaaaacggctgttcaggtcgtaaccggcgagacgtggatgtttgaactcctttagtgcgttggcgctgtaagagttgatgcctccgctaagaaggaaaggaaggagaccgttataggtatgcagaatattccagtcgaacaagttaccggagccgccgtattgttcgcatttggtatcgaacaggaaaaggtcacagactttctcatacttatatacatttttcagatctttcggatgggatatagaaaaggctttgataatttttatccccatggaatacaatgatcgacagtattccggtgactcatttccatgtagttgcacatagtttagtccgaaacggtcagcatacatactgacaatctgcttgtcttcgttcacaaaaacaccgacacggtgggtgtggataggcagataagccggaagctcatagacataccggggagatttgggatagaagataaatcccagcatatctatatcttggagcgattctatctcctgtatgttttcggcttcgcgcataccgcatactttgatgatttttccgttgaccataaatcttctgttttgaataattgatttattgtataccttgcaggaaattccctaaggtgtttcccggttgtgtagttctcataaatgtttctccgatcaggaatccccggaatccggctgtttgcagacgttttacagtttgcgggtcggagattccgctttcggataccaatactgcatcttggggaagttgtccggccagccgaaaagagttttccacatcagtgaagaatgttcctaaattccgattgttgattcccaccatatctattttctcattaatataagttaactcctcggaactgtgaatttctagtagtacttccagacctaaatcgtgtgctttcttcacaagttcattgcatttttccggtttcaaagcagcggcaatgagaagtacagcatctgcaccaacaattttagcttgatagagttggtattcgtcaatgataaaatcttttctaagaatcggaatatctaccaaaggacgtgcagcgcgaatgtctttcaagttccctccgaaaaacttctcatccgtgaggatagagagcgcagaggcccccgcagccgcataagccggagctatttcttccggacgagcctcctgctttatccagcctttggacggagaacgacgtttgaactctgctataattcccggagacgaggaaattaatgcctgtttcatggaacgggaagacggcatttcactaattccttcctgcaactgctcgatagaaatcgcctgtttttgcagatctacttcaaatcgtttatttgctatgatttcggataatatatctttcatattttaattattgagttcaataaacttctttaatgtattcagtgcccttccgctttctagtgattcttttgcaagagtgatacattcttcaatagtcttttccggacaaataacatgaatggcaaaagccgaattaactactactacatttttttgagcttcagttgctgtattattcatgatattatcgaaaattttggcagcctctttcggtgtctgaccgccatccaggtcaatgtccctataacgggagaatccgaggctttcgggagtataaatcttttcgttgtcactcgttgctaccttaaattcattcgtcagagaaatttcatcatatccgtccaagctatgaacaacggcaaatttggttttactttcctgataagtataagtatagaggcgtaataacggaagattgtaaactcccaaaagttgataagccggtaatactggatttactaacgggccgagcatattaaaaaaggtacgcacggcaagtcctttgcgaaccggagcgaccgcttttaatgccggattaaacaacggagcgtgcagataagcaatgttacattgttccatgctgcggcgcaactgatctatatcgtcggtgaactttacaccatgttgttccattacgttactggcgccactaacagatgttgctccgtaattaccatgtttcacgaccgggaaacctgctccggctaccgtgaagcaagatgctgtggaaatattgaacgtgtttttcccgtcaccaccggttcctacaatatctatcggcgcaaattcgcttaaatcaaccggaacgcgcatttccaacaatgcgtcgcggaagccgcataattcttcgactgagatattgcgcattagaaagacagtgatgagtgaggccacctgtacatcgttatattttccttgtgcgatattttgtaagatagtacgggcttcatcacgtcccagatattgatgctcgaaaagcttgtatagaatctgtttcataaatttaattgtttaagaagttcttgataatttcttttccttgcggagttaatactgattcggggtggaattgtatcccgtgcacatcataggtcctatggcgcaatgccatgatttgtccttcccggctttctgccgttatttccagacagtcaggaaaatcctcccggctgaccacccaagagtgataacgtcctacgggaatttcttttcccagcccttcgaataatacatcttgtcgtaggatactgaccggggtctgtacaccgtgatatacctctttcagattctccagtcgtgtaccgaaagcctcgccgatagcctgatgtcccagacagacacctaaaatacttttcgtggctgcatactttttgataataggcaacaataaacctgcttcttccgggatacccggcccgggagacaagatgattttatcgaatcgttccacattatcaagtcctatttgatcgttgcggactacttctatgtccgtagcacctaattctttcactgcgtgcaataagttgtaggtgaaagagtcgtaattatctaaaagtaatattttcattttatgattattgtaaaattgttgcttaaacaggttactttattttttctgcttagttctttaattgaacggctaaatcaatcgcctttttcagtgctcccaacttattgttgacttcttgcaattcgtattcatcctgactccgtgccacaataccacctcctgcctgaaaccacaattcattgttgcgactgacgaaggtacggatagttatggcttgattcaattcaccgtttaatccgataaaaccgatacaaccaccgtaagctccgcgattgtgaggttctatttcactaattaactgcatggcacgtactttgggcgcgccgctcaaagtgccggcagggaacgtatcaataaaagtttttatcttgtccgcatcctcgttcaattcaccactgacacggctaaccaagtggatgacatgactgtaatattgtggctctttatagaaaagtacctgtacatcatgacaattacgtgacaagtcgtttctggcaaggtctaccagcataacgtgctccgcattttctttaggatcagccagtaatgcttctgccagttcacggtctttcacgatatcgccactccggcgtgttgttccggcaatcggatcgatataagcatggttgctttcaatcttgcagtgtgtttccggtgaagaaccgaagattcgatatcctccgaaatcgaaatagaaaagataaggggaagggttaatgctgcggagtgcccgatatactttgaaatcatctccggcgtaaggctgaatgaacctccgggaaagaacgatctggaatacatcgccacgcatacagtgcgcaatacctttgcggacgttggctttgtgttcttcatctgtgatagggctggtaacgggacctgtcacagaaaaattgtaagaagcataattccggttttcaatagctgcttccagttccggcaggccgctttcttccccttcggccaacatctctacgagtgtcaattcatttttgaaatgattgaagacaattatgtatttgtataatatatataataagtccggtgcatcattctgttcatcgtggctctctttaacgggaatatgttcgaagtatttcacggcattgaaagtcgtgtatccataaagtccgcatacattcttattttctccggtcacttggaattgattgatgaatcggttcattgccttttctacggtgaatgttttcgtcagcggttcttccgtgcggctattgtccggatagttggctgtgactataccactgttcacaccgatatttgccagtggacaaagggcgatgaatgacagtgaattttctccggcgtgataatcggaactctccattaatgcagattgcggatacatatcacgcactttcagataaatgctgaccggagtatgcatatctcccaacacctgtttactgtgggtagtataattgaatgttttcattttgattacaaattacaagttacaaattactgtgaactaattgtcctgtttttcttcgttaaaggataaataagtctctatatccttgtcgccacgtccggatacagttaatacgactacatcttccggtttgaatttcaacttttttaaagcgccaagcgcatgagctgattccagtgcggggataattccttcaaacttagtcagttcataagcagcttctatggcttcgtcatcgtttattgccagaacgttggcgcgtctttgtgcggcaagattcgcgtgtatcggtccgatacccggataatcgagtccggcagaaatcgaataaggttcctcaatttgtccgtcttcgttttggataacgtaagtacgtgctccgtggataattcccaatttgccaagttgaatggtagctgcggtcattccggtttctattcccttgcctccggcttctgccaggacgatacctacccgctcatcgttgatataatgataaatagttccggcagcattacttcctcctcctacacaggctatcaggtagtcggggtaatcgcgtccctctttttcttgaagttgctttttgatttcttcactgataacggattgcagacgtgccaccatatccgggtaaggatgaggtcctacagtagaaccgatgatataataagtgtcggcgggatgacagcaccagtcgcggatagcttcgttggtagcgtctttcagtgtcatattcccggaggtgacagggattacggtagctcccagcattttcattttctcaacgttgatgtgctggcgttccacatccgtttttcccatgtatacgatacattccatattcattagtgcacatacggtagcggtagccactccatgttggccggcgccggtttcggcgatgatgcgcttttttcccatgcggcgtgccaatagaatctgtccgatagtgttgttgattttatgggcacctgtatggttcaagtcttcccgtttcagatataatttgcaaccatattttttcgaaaggcgccttgccggatagagtggggaaggacgtcctacgtaatcacgtaacaactgttcgaattctttcttgaattcctcactctcaagtacttcgaggtacttattcttcagttcctctacacatttgtggagaatttccggtacataagcaccgccgaactctccgtaatagccatcctggtcaactaaaaaacttttcataatcctatctatttttatatgttatttttttcgatgtttagaaacgggcaaataaaaaagccctgccgcaagttgcgacagggctctttcaaatctgttatatctttaatgaggtatatacatacgagcgctgctcccttacgactgtcggagttgtaacggacgccaccaccaatatgtatttactaatatagttctcattgtcatttgttatttaacgggagcaaatatagacactttgtttgaaacaacaaacaaaaaatgactttttttcattttccccttcatttttctgatatagaacaattttccccctgatctgttcttataaatactgaatatttaaacagaaaacaattatgaaacagagaaaagtattagtaggtatcgctattgccattttcgttatattattactttattggttgttggtagcagaagatatgaaaccttggttgtcggctatggttccttctcttacgcagcaattcatagcctgattccgacaaggtttcagataattcgtgtatatttgcatgaaacatgaaaagtgaataataaccgaaataataacaatagacaagatatggaaaattttatctttcaaaatcccgtcaaactgataatggggcgcgggatgattgcccgattggcgaaagaaattccgtccgacaaacgtatcatgattacttttggcggtggaagtgtaaagaaaaacggggtatacgatcaggtgaaggaagcactgaagaatcattataccgttgaattttgggggattgaacccaatcctgctatcgaaactctccgcaaagcgattgctttgggaaaagaagagaaggtagattatttattagctgttggtggtggttccgtgattgacggtacaaaattaatctctgccgggttattgtatgacggtgatgcttgggacttggtgcttgccggacgtcccgctacccacactgtacctctttccactgtgttgacgcttcccgctaccggttcggaaatgaacaatggagcagtgatctcacgtcgtgaaaccaaagaaaaatatcctttttattccaactatccgttattctctattcttgatccggaagtaacatttactttacctcctcatcaagtggcttgtggattggcggacacatttgtacatgtcatggaacagtatatgactactcccagacaaagccgtgtcatggaccgttgggcagaaggactcctgcaaactcttatagaaatagctccgaaaatccgtgagaaccagcatgattatcaacttatggctgactttatgctttcggctacaatggcattgaatggatttatagctatgggagtatcgcaggactgggcaactcacatgataggacatgaaatcactgcattgcacgggttgacacacggacatacgctggcgattgtacttcccgctacattgcaagtgcttcgggaagccaaaggagataaacttgtgcaatatggtgagcgcgtatggggaataacttcgggtacaaaagaggaacgaatagatgaggcaatccgctgtacggaacaattcttccgttcattggggttgactacacgcctgcacgaagaaaacatcggccaggagacgattcttgaaattgaacgccgcttcaatgagcgaggagtaaaatatggagaaaatggaaatgtgacaggtgctgtggctcgtaagatattggaaactgcactataatttcttttcctataagaaataataactgccttgtgacttttatcagaaaagtatacagggcagttttttattgttcaatcgtatcgtgtattggcaccccaaagcaatacgggaatatcttgtttgatattaaaatgacgtcatttaaaccaaaaataattttaatttgttttctataagggggaagaaatatctatatttgttcactcaagtttttgatatcatcgaaataaaacattcattttattttattacttatgttgataaccattattattctcgttctttcggctatcttttttgtaaatggtaaaatccgttcggatattgtggcgttatgtgcgctggttgctttacttgtctttcagatattaactcctgatgaagccctttcgggtttctccaattcggtagttattatgatgatcggactgtttgtggtaggaggtgctatttttcaaacagggttggcaaagatgataagttcgcgtattcttaaacttgcgggaacgagtgaaattcgtctgtttctattggtgatgttggtgacttcagctatcggtgcatttgtcagcaataccggaacagtagcgttaatgcttcctattgtggttagtctggcgatgagtgctgggatgaatccgagccgcttgctgatgccgttggcatttgcaagtagtatgggaggcatgatgacattgattggtactccgccgaaccttgtgatacagaacacattaacttcggcaggactcgaaccgctttctttcttctcttttctgcctgttggcattgtttgtgtgattgtcggtacattggtattgatgccgcttagtaaatggtttctgtctaaaaaaggacagaagaatgacagtaaccgttcaggaaaatcgttaaagcagttggtcaatgaatacgggctttccagtaacctgtttcgtttgcaggtgataggggattcccgactcttgggaaaaacgattattgatttggatatacgacgcaaatatggattgaatataatggaagtccgtcgtggggatgcatcgcaacatcgtttcctgaaaactatcacgcagaaatttgcggcaccggatacggttttgcaagtagaagatattctgtatgtgacaggagattttgagaaagtacaactgtttgctgaagattatctgctcgatatattaggtgaccatgctaccgaggaaacgaaaaatacaactagttctcttgatttttatgatataggtattgctgaaatagtattgatgcctgcgtctaatttggtaaaccagacaattaaagaagccggattccgtgataaatataatgtgaacgttttaggtatccgtcgtaaaaaggaatatctgttacaggatttgggaaatgagcatattcatagtggcgacgtgcttttggtacaaggcacttggggaaatatcgcccgtcttagtaaggaagactctgattgggtggtattaggtcagcctttagccgaagctgctaaagtaactttagactataaagctccggtggctgctgctatcatggtgttaatggtgttaatgatggtatttgattttatcccggttgctccggttacggctgttatgattgcgggtatattaatggtactgacagggtgtttccgtaatgtagaggccgcatacaaaacgataaattgggaaagtattgtactcattgcagcaatgttgcctatgtcgttggcattggagaaaataggagcgtcggagtatatatccaatacattggtgagcggattgggttcctatggaccattggctctgatggcgggtatctattttactacttcattgatgactatgtttatcagtaatacggctactgcggtactgctggcacctattgctttgcaaagtgctatacaaatcggggttagcccgattcctttcctgtttgctgtgacagtgggggcaagtatgtgttttgcttctccattctctacgccgcctaatgcattggtaatgcctgccggacaatatacttttatggattatgtgaaagtaggattaccgttacagattatcatgggaattgtgatgatatttgttttgcctttgatcttccctttttgattgaaaaagaaaaaaacaggaaggctgtattgaaaaatgcagcctttttttatttaatatctgcaaatacagttatctttgcaccgtccatgaccgatgattgagagggttgtggatgtttttgcgcataaataaaacgaactaaagcattaagggattatgaaacaaaacattgcaaaagtattaaccttttctttattggcaacttctgccgtttttatcagttgtgtggataatgagaaaaatctgtttgatgcagaacaactgagacagatttatgaagaaacttttccggtaaagaatatcgatcctgacggagactggactatgtcccgtagtgtaactgcacacgtgacggttaatggagatttaggagaggattatccgatacggatatttgatgcgaatcctttaagtccggaaagtaatgccaaacttttagcagaaggtgttgcaaatagaagtacatcttttaatgttgtaatggattgtgctactgcactcgatagagtatttgtcgcgcgtgtagacagaaaaggacattatcttgtgcaaccgatcgctattgaaaatgaagaggtgaaggcctgtttcggaaataaagaaggtagtactacttgttctatcacgagaactataacagatatacctgctatggcagctccttatacagatgagtatattagtaataaaaaggcctatgctactattattaagtccggctgggatcttggctctggatttgaccagtattctgcctataatcttcctgttttcaaggaaaaggaacgttggtttaagattcaggaagggggctttagggcaagatttactacaggaggaacttggggtggagctaatgccgtgaaagtgattgttcctgaaggaagtacatgggtgattgaaaacgaaaatcaattcagtgatataacggaggtaatagttgaaaatggaggaaaaatagaaataactagaaatgccagtttgatattgactcgggcttcttatataactgtaatgccgggtggtagtattataggtgagggagatatttcaataacaaatagttctgccgggtttagtaattataatgctggtatgattgattgttcccgtttaaatattgatggcggtggaagtggggttgatttcatgaattatggaacgcttaaattgaattcttacaatgcatctacaagcggtacaacactgataaatcacggtgttattgaggctggtagtattaatggtaataacaataccaatgttaagaacggctgttatatgaatgtggcaggaatgtttcagttcggtacacttataatggggcatacttctgaagctatttgtggggagttgggttataacggaaataacaatgatattgtgatggaggcacaatcaatactgacctgtacaggtaaagctagtctatataggcatgtagtcggtcccacaacgggaacggctttgttgagaattcatacgattgctaatatttcagggctcattgaatcaaattcgaaagtcacgaataacattatttgtgagataacagaccagacctcttctaatgaaaaagagcaatcactgtggactcctttcgactggttagtatataaaggcttacagaattccgccacttattgcaatccgggaaaagcagattttttgcttcctgctgatgaagatgggtgtataaaagaaggatatggttctgatgatacccccgatgacgtggagattcggaaagccgtttattcctatgctttcgaagataattatcccaaagcaggcgattatgatttcaatgatattgtattgaacgtgactttacccgttgccggtaatgaagtgaaagaattgaaatacgtggttgaccttcaggctgtgggtgccatgaagcaattaggtgccggattaagaatactgggaataaataaaagtaatgtggaaacggttgactttggagccggcgccgctcaacgtgacggttctttgtctgcttcccgtatatttgaagatgcatcttatgagacgactggcagtgaacttgtcattcctttgtttggagatgcacattctgtatatggatataccggaacacaacgtcctatgctgaatactggaaatgcaagtacatctctaacagatatatatactcttgaagtgataatcaaacttaaaaatgccgtatccattcccagtgtaacaaactgtttagacttctttatagcatatcagggtactggtgaaaagagaacggagattcatttgaatcaatttaattcggcaacggcgaatggtcagttggcagataataacgtgcttgaggttatcaaggtagtcaataatacatgggctctttgcgttcctgataaattcgcatatccgacagaaagaactgtgataacagaggcgtatgctaagtttgcggactgggcacatgaccagagtactaataccgattggtataatatgccttcaagtagtgataaagtgatagaatactaaccttttcttttaaatataagtcaaccgccggagaagtttttgttttccggtggtttttgctacgaattaatgctttgattgtaaggtagtagtatttgttttacatgatcttattcgtctgacagttgttgaacattcgtttgacaactgttgtcttttcgtctaacaactgtcagacgaaaagaagacagctgtcagacgaataaattgttgcaaactgaggtataaattctttaacttggagaagtagaattatgcgaaacaggtggtacattcatattctgtgtgtacagactatcaatgataccatcggacaatccgatagtaggtacaataataccagtagcttttacataagtcgccacctcaagaaatatctctgctgccggaacaattacatctgcccgatccggttttagcttgtattgtttgatgcgctgttcggcgggaagtacctgtaatgctaaataaatctcacgtagtgactcaactggtaggagagaagcctttttatcctttttatccgcgagacggaagagtttgttgatatttccccccgaaccgataatgctgacaggcgcatattctgtggcaatgccaatcaggtcagtacgtaacgcttctttttcctcctctttcaccatgccgctaagcatacggactgtacctatattatatgaacgggagtttttcagttctccgttactgataagattgatttccgtactaccgccgccaacatctacatatagataattctgtccggaagcaaacagttgctcgatatgattgtcatatacgatatgcgcttcttcctgtccgtcgataatatctacacgaatacccgtttttttggctatttgccggacgatagctttaccgttccgggcatcacgcatagcggacgtggcacaggcgcgataatccactacatcatatattttcattaactgcttgtaagctttcatcagccggatcagtttcttttctttttctgctgaaataatacctgctgtgaaagcgtcttctcctagccgtaacgggatacggatgagttgcaccttactcataagttcgggcgcattttcttcgtttacgcattttatcagtagtcgtacggcattggaaccgatgtcgattgctgcataattaactttcttcatatttatcatcatgtgttcttgtattcgttatataatttttcttgtgaacggaaaagcgatgccatttcttcactaagcgggggagtaaacggaaaattccatatccggttggttcccattccgtctactatgcgtcctttggctgtatcctgaaacccgtaacaaacaatccgttttaaatccgcctgtatctctttgtcataaacaggagccagtacttcgatgcggttgtccagattgcgtggcatccaatctgctgaaccgatataatacctttcttctccggcattagcgaaaatgaaaatacgtgagtgttcaagataacggtcgataattccattgatatgtatattttcactgacacccggaacgcccggtactaaagaacagttgccgcgtacaactagttctatcttgactcctgctgctgaggcttcgtatagcttttcgataagtgcgcggtctgttatgtgatttactttggcaaggatataggcgtcttttccttgttccttgttctttatctccttattgataagggcaatcaaccgtttacgcatatcattgggagaaacgagcaactctttgaaattgacgggagtgtatggcttctcgataaagtcaaatactgcatttacttcccggacaatgggacggtgagttgtcataatggtatagtcggtatacatacgtgcatttccttcgtggaagttgcctgtactgatacagacaatatctccatgtcttgtcccgatgtgcaccagtttggagtgaatcttcagcccttccaccccgaagattacacggattcctgcatcctgcatccttttactccagttgatatttgaggcttcgtcaaaacgtgccagtagttcgatgactaccgtcactttcttaccgttctttgctgcgcaaatcaatgctttaaccactttggagtctttagctagtcggtaaagcgtcatcttgatgcttttcacttctttgctgatagcagcttcgcgcagtacgcggatgaacgtatcaaaactatgataaggataatgtagtgaacggtctttctggcgaatcagggtcagcaggctttctgtaccatttagttcgggtttgaaaatcggttcccaaaccggatatttcagatgactgtgtccgcagacaggaaatttcatcaggtctttgaaattatgataacgtccgccggctacgcgggtgtcgttcttgtctatattcagccggtcggtcagtctttttagcaagtccctggggatttgctcgtcatatacaaaacggagaggttcgcctttcttgcggcttttcactcctttggagattttctgaagtacgccggtccgcaaatcactgtctatttccatttcagcgtctttggtaaatttgaaggtatatgcttcataatccgtatatttcattccgacaaaaatcattggcaggcagtaacggataacatcatcaagaaacattagataggtctttccttccgattcgggtagttggatgaagcgtccgaattccccaacgggcagttggataaccgcgtaatccttctcttttatttttcctgcttcatctttgcggagcaagcggatagccaggtaaatatcttcatctgtctggtcgtccagctgtcggggaccgttaaggaaaagagggttggtggaaccgttcagcttattacgatagaaagaagtgatgaacgctttctgctcatcgttcatttccgtttctttgataacgtagatattctcttttttcagttcttccatgatagaagcgaacgtttcttcaaactgttcatagtaacggttgtgcagtttacctatctgtttcagtgtgtgcgcagcgatttcctgttctttctgtatattcttgtcgtcatactctataatccggtttaaggtagcgacacggacgcggaagaactcgtcaagattgttcgaatagatgccaagaaaagtcagccgttccagtaaaggaacttccgggcgggcagcttcgagtaagatacgttggttgaaatacatccaactgatgtcacgctcaacataagggcacttctttcttgtttcgcttggtttcatgatgaagaatctatttttaattttctgcaaaagtatctaagtgagatgtaatagctataacgattttgttacgaacttattacaatgtttatttgttatttttatatatcagtagaaacacttatattcgcaaaagtattgaaacagacttggttaaaaaatatagaatttatgaaaacaatgaattattcccttattcgtattctctttgcattagtgattggtctggtgttggtgctgtggcctaatacagctgccagttatatcgttattacggttggagttgcctttttgattcccggtgttatcagccttttcggctatttcggacgtaagaaatccgaagacggagtttcgccccgttttccgatagaaggagtcggtagtctgcttttcggactttggctgattgtaatgcccgaattttttgcagatgtcctgatgttcttgttaggttttatcctgataatgggaggggtgcagcagatagcttccttgtcaatggctcgtcgttggacacctgttccgggagcattttatctggttcccgctttgattttaattgcgggcatcgttgctttattcaatccgacaggagcacgtaatacagcgtttataattattggtatcagtagcttggtatattcgctttctgaattgataaactggtttaagtttgtacgttgccgtccgaagaacccgatatcacatcacgatgaggatattgaggatgcgaagattattgaataaaataagaaaaagaagagggctacctcacggtacccctccactgcaaacttaaaacaaccaacaaaagaaatagatcatttctactttatgtccgatgaaaacttcttcatcggacattctctttttctatcttacaaataatagttctctgtatttcggaagtgtccacatctggttgtcaacgataagttccaacttgtcgatgtgataacgaatttcttccagtgccggaacaatcgtgtcgtgataagcaatggctttttcacgttcgctttcaatcttgttcgccactttacgcgcttctaccattgcgtctacatgctctttgatgaaggctgtacggtcagcaatttcttcgataagttccagattctttgctgatagtttcgccgctttttctgccggaaacagggattgcattttatagacgttattaatcaaatccgtctgatactgggttgcaaccggtataatgtggttcatagccaagtcacccaatacacgggcttcaatctggatcttcttcgtgtaggtttcccatttcacttcattgcgtgcttccaactctttctttgtcattacaccggtagcttcgaacatggcaattgtttccggtttcaggtagttgtcgaagataacgggaacactcgtttcacaatccagaccacggcgtgcagcctcttctttccattcgtcactgtagccgttgccgtcgaagtgaatggctttacattctttgatatatccgcgaatgatttcaaggatagcggaaactttcggttctcctttttcaattagagcgtccacgtctttcttgaacttcgctaactggtctgctactgcggagttcagcgcaatcattgcagaggcgcagtttgcttcggaacctacggcacggaattcgaaacggtttccggtgaaggcaaaaggagaggtgcggttacggtctgtattgtcaatcaacaattccggtatctgcggaatatccagtttcattccctgtttgccgctaaggctgattaaattgtcttttgtgctgttttcaatatggtctaatacttgcgataactgctttccgaggaaagaagatatgattgcgggaggtgcttcgttggcgcctaagcggtgggcgttggttgcactggagatagaagccttcagtaacccgttatgatgataaactgccattaacgtatttactacaaatgtcacgaaacgcagattgtcttccggtgtcttccccggtcccattaataagattcccgtatcagtacccaatgaccagttgttgtgcttaccggaaccgttgacacctttaaatggtttttcatgaagcaatacacggaaaccgtgtcgacggcttaccttgcgcatcaatgacataatcaataagttatggtcatttgccaggttacattcttcgaatatcggagctaactcgaactgattaggagcaacctcgttgtgacgggtctttacgggaatacccaatttcagagcttcaatttcgagctctttcataaaagcagctacacgggtggggatagcaccgaagtagtggtcttccaactgctggtttttagcactgtcatgtcccattaaggtacgtcctgtcattaataagtcagggcgggcagcatataaaccttcatcaactaaaaaatattcttgttcccagccaaggtaggcaaccacttttttcacttccggattgaaataatggcagacgtctacggctgctttgtctactgcacgtaatgctttcaataatggagctttatagtcaagggcctcgccggtgtatgcaataaacacagtcgggatacaaagagtatcatctacaatgaatgcaggagatgaagggtcccaggcactatatccacgggcttcaaaagtattacggatacctccattcgggaaagaggaagcatccggctcttgctgaacaagtaatttgcccgtaaattcttccatcatgccacctttaccgtcatgttcaacaaaagcatcatgtttttctgccgtaccttcggtcaggggtgcaaaccagtgggtataatgagtgacacccatttcgatagcccattttttcatgccggcagctacttcgtcagcaatgctacggtctagcggagcaccattatcaatagcatcaatcagtgcattatacactttgctgggaaggtatttaaacatcttttccttgttgaacacatacttggcgaaatattccgacggacgttcaacaggagttgctacctcaaccgctttcttcttgaaagcagtctctactactctgaatcttagttttgacataatacctaatttgatttgtagttaaatatgttagagtaaataattacgttctcttatatggttagttgtatgctgattctccgtgttcgtagatatccagcctttcttcttcaactcgtgccggaacgcggagtccgtggactttgtcgagcactttgaagatgatgaatcccatacctgctgccacctcttacatcataataagagaaccattctatgtctgctcaaagccagttctttattcttctcatggcttcaatgcagtcgttacgttcaccgaatgccgtcagacggatatagccttcgccgctggggccaaaacctacaccgggagttccgactacgttggcctcatacaacatctgctcaaagaaccgccatgaagaaaggccattcggggttttcacccataaatagggagcgttgactcctccgtaaactttcaatccgctagcttccagtccttccttcatgattcctgcattggtcatataatagttaatcgtttctttaatctgttcctttccttctgcgctgtaaactgcttctgccgcccgttgagtgatataggaagtgccgttgaacttagtacattggcggcggttccacagtctgttgagtgggattctgtctccttcgagtgttgcggcggtaagttctttggggactacagtgtatccgcaacgcactccggtgaatcctgccgtcttcgaaaaactacggaactcaatggcgcacttcttggctcccttgatttcataaatagagtgggggacatccgcatcctgaatatatgcctcataagcagcgtcgaacaggagtaacgtgtcatttgccaaagcgtaatctacccatttcttcaattccggttttgtcagtgtagtgccagtcgggttattcggatagcagagatagacaatatctatccgtttgtccggaatttcgggtatgaagttattttcacttgtgcaaggcatataagttacattactccacttacctgtttcttcctctaatactccggcacgtccgcacatgacgttactgtctatataaaccggataaatagggtctgtgacgccgacactgttgtcatgacggagaatatctccgatatttccagtatcgctttttgctccgtcgctgatgaatatctctgaagcggagaaatgaataccgcgcggagcaaagtcattttttataattgcttcaattagaaaatcatatccctgttcaggaccatatccgcggaatgtatccttatcggctagttcttctactgctttgtgcattgcttcgatacaagccttgggaagtggctgagtaacatcgccgatacctagccggatgatgtcctgcttgggatgcgttatcctaaaagtatttatcttttttgctatatccgagaataaatagcttcccggtaattttaaaaagtgttcgtttactaatgccatgtggttattgttttaagtttctatcaattattattattaattcttcattttcaacccctcaaccctcgatttcttcaatttctccgtcaaaaactttagttgccggtcccgtcattaatatatggcccgaggcttcatcccattcaatggtgactgtaccaccgtccattattatatcgctttttcttcctgtaagctcgttgatgaaggctgctactgcggtagcacaagcacctgtcccacaggcttgagtaattcccgaacctctttcccatactctcatccgtatagtatctttgcagacaatttgtgcaaactctacattggttctgtcggggaaaagatgatgattctccaattcagggccgatttccggcaaattaatctgggtaatatcatccacgaaagtaaccagatgaggatttcccattgatactctggttgatcggaaaggatatttatcctcaaaatgaacttctcctgtttctaatggactgcccatatctactgtgactgctgtaactgtttttccttctacatgaagtttcagaattttaattcccgacagtgtgtccagagtgatttctgttttatcagtcaagccatattcatatacatatttgcctacacaacggcttccattaccacacatcatcgcttccgaaccgtctgcattgaaaatacgcatactgaaatcagccttatcagagtttccgatcaatataagtccgtcactcccaattcctgtatggaacttgctccattcgattgctttcttttcaggagctgctatcggatagttggtagtgtctacatatatgtagtcatttcctgctccatgcattttagtgaacttaatcttttttgtcattttgacttgtatttgctggttgttgtatccttttgttttattacaacgcaaaggtatgactttttgctttatgttttattgaaatatatatctaatctctatttattttatgtaaactttcaattgtttcgtatatagctatgtttggttataatctgaaattatatatatatgtatattgataaactgttatttaggtgaattgttttgcatatactttcataatatataaagaataattagccttgataatctttaaatttagtcataagaataggaaaaaactcctttttgttttgacgaaatgaaagcggatagctttatttcactatcatattgcttgccggatactctgaagaaccttttcccgtattcattgttctagcactatattaatataaaaatgtagagatatgaatatagagaaacaattagaaacagcagtacgaaccaatcatttggtattggttgtattttatgcggactggtcgcctcattacgaatggatagggccggtactccgtacttatgagaagaggacaatcgaattagtacgagtaaatgttggagaagataaggcaatagccgatgcgcataacatagatactattccggcttttcttttattacataagagaaatgaactctggagacaagttggggagttgacagtggaagaactgaaagatgtattagatgatttcaagtgatcggactgtaatcttttataagtatgcatagaaatatcaatttcttcctcaattaaaaataacgaaaaatgtagtgtattgataattaagttcttatatgtttgcatttttctttaaaagaaaccatacgtttgacaccgagaaatagcccgttccttttaaaggaacgggctgtttcattaatgttgaaggatagagtattgaatgtgtatgttttatttattcttttttagttcttccaacaaaacaaccggctcattggtcgtaatgaaatctactttctgttcaattaaccacttcatttcttcggcttcgtccactgtccacacattgactttcagaccaaggtcatgagcttctttaatccattcgggatgttttttaatcactcccatgtgatagtcaagacccgtagccccgagttcttttaattctttcggagataattcaccgttcagatagaataccggagtgccggcaggtgccaggcggataaactctttcatggcatgcaatgagaaagtgatatattccatgcggctctctaatcccatttttttcaccgtagccagaatttcctgaacggctttggtctcgcgctttttgctgttaagtgctttcagttcaagtatcagtttagtattatgttcttttccgacttttaagtactgctccagacttgggaggttttctccatttgataatttcaacccagtgagcgcgtctcctttagaatactccataggtctcattttgtacacaggatcatgattgactactaacttgctgtctttagtaagccaaacatcaaattctgaaccataacaaccgatagagtctgcttttagaagtgatgtaatactgttttgtgatgatcccggggttttccagaaaccgcggtgagcaattgcttttgtctgcgcctgcatacaacatgcagccattaaaagggcggaacctatcatcattttttttaaattcattcgttttatcttttaaagggtttatataggtttaattgggtttggcttcaaaattataaaaaagaaaacgcaaattagtcaattatatgctaatctgcgttaatccttgggatttagaatcgaaatactacaaaaaagtaacagaaataaccgattctgtgattctttctgtcgtcagttaagtataggcttcttcatgtattccttttactgcgcgtccgctcggttcattcaggttcttgaaggcgatatcccatgccagcgcttctgctgtagagcaggctacgctgggaacactgggtacactgcgtgctgcactttcgctggggaaatgttcttcaaagatactgcggtaataatattcttctttattttgcggggtattgatagggaagcgcctggccgcgttttccatttgttcatcacttacggcagcagtggttatttcttttaacgtatcaatccaggaataccctacaccgtcactgaactgctctttctgtctccatgccacgctttccggtagcatatcggcaaaggcttcgcgtacgattctcttttcaatgttttttccgggacacattttggctttcggattcaacgtcattgcgacatcaagaaactctttgtctaagaatggtacacgtccctctacgccccaagctgacaaacttttattagcacgaagacagtcatacatgtgtaatttagaaagtttacgtactgtttcttcatgaaatgcttgtggggtgggagccttatggaaataaaggtatcctccgaaaacttcgtcggcaccttctccgctcagcaccattttgattcccatggatttaatgacacgtgccaatagatacataggagtggaagcccgtacggtagttacatcatacgtttcgataaaatagataacatcacggatcgcatctagtccttcctgcacggtgtagtttatttcgtggtgtacggtactgatatattcggcaacctcacgtgcttttatcaaatcgggtgcacctttcagaccgatagcaaaggagtgaagttgaggccaccatgcatcgcttgctccgtctgtttctatacgtttggccgcatatttcttggcaatggcggagataacagaactatccaagccaccggaaagaagtactccgtaaggcacatcactcattaattggcgatgaacggcatcttctaatgcttctttcacatcgccggctttcgcatcgttgtcttttacagtttcatattccgtccagtcgcgtgcgtaccaacgtttcatttgcccttccttgctgtaatagtaatgtcccggaaggaataattcatactcatcgcaaaatccttcaagagctttcagctcgctgccgaaatatattttcccgtctttgtccctgcctatatataaaggtatgacgccaattgggtcacgggcaatcagaaattcatctttttcttcatcgtagagaacgaatgcaaagattccgctgatatcttccaaaaagtgaatgcctttgtctttgtaaagggcaagaataacttcacaatcacttcccgtctgaaaatcatattttccggcatatcgggtacggatttcccggtggttatagatttcaccgtttacggcaagtacttgtttccggtcgggagagtacaaaggctgccctccactttgcgggtcgacaattgaaaggcgttcgtgtgccaaaatcgcacttccacctacatagataccactccagtccggtccgcggtgacggattttctgagccattttcaatgctttatctcttagctccttggtttgagcttttatattgagtatacctgctattccacacataactttaatttttagttgttaaataagtatctatttccgcagccgtctttcgtcctcctgccatggcgcgtaccaccagactggctccggtagcagcatctccggcaagaaatacattatcggcaaaattcggttgttccggttttaagaatcccatggctagcaataccatatctgcctcgatcacctcttttttcccggtaggtttcagtgtcggacgtcctccgtctgttgccggaatccattctacttcttccacttccacacctgttacgttcccattttttcctaggaattgattggaagtgaggcaccagcggcgtatgcaaccttcttcatggctggaagtagtcttgaggactaccggccactgcggccagggggtagacgggttatgtcccacgggtggctggggcatgatctcaatctgcgttacgctggttgctccttggcgcacactagttccgatgcaatccgaccccgtatctccaccaccaatgacaagtacctttttgcccttggcattcactaatttatctttggagaaagtttgtccttccagaatcctattctgttgggccagcatttcaagtgcaaagtaaatacctttcaaatcccgtcccggaatacttaaatcgcgtgctgccggtgttcccgtacagatgcagtaagcgtcgaatccctccggtaaatgattgacgtcaatttctactcccatttcaaacttgattccttccgcagttaagatattcatgcgccggtcaatcacattcttatccagtttaaaattgggaataccgaaacgtagcaatccgccgggagcttcgttcttatcaaataaggttactgaatatccttttagattgagttgattggccacgaccagtccggcaggaccggcaccaataaccgctactttctttccgtttctttccggggtctgtatttgtatatatccttcacgaaaagctgcttcaacgatagccgcttcgttttcgcgaatcgtcacaggttggtcacatgaaagttttagtacacaagacttctcacaaagggctggacaaatacgccccgtaaattcaggaaagtcacaggtggacgataggatttcgtatgcctctctccatttccctttgaataaagcgtcctgccattccggttgtttattccctatcgggcatgcccagtggcagaagggtacgccacagtccatacagcgagaagcctgtaacttgcggctgtttgtattcaatgtttgttctacctggctgtaatcagtgattcgttcgttcacagggcggtatcccgcttcctgtcgaggtatatttaaaaaagctctaggatctcccattttctttaagttttaagtttaattttagtcccgcatggaaacctggctccggcatctgccggttgtcggttaatagtctctttgcatatctgcaatcttttgttgtaactttctcatttgctcttcctgtagcacttttttgtactcgataggcactacctggataaattgatcgacataatgattccagtcatcaagcatggtacgtgccagtttcgaacctgtatataagtaatgttgacgaatcagttcgtgtaattcttttcggtaactggcttcttcaatcagtgaaagttctaccatttccatattgcagaaatagtcaaagtttccttccttattccatacatacgctaccccaccactcataccggcagcgaagttgcgtcctgtctgtccgagaaccaccacacgtcctccagtcatatattcgcaacaatgatcgcctacaccttctactacggctactgcaccggaattacgtacagcaaaacgttcacctacacgtccgttgatatacacttcaccacttgtagctccataaagtaacgtattgcctgcaatcgtattcttttcagcttcgaagttgctacggataggagggagtacggcaatacgaccaccgcttaacccttttcccagataatcgttagcctcgccttccagtttgaaattaactcccggtactaagaatgcaccgaatgactgacctgccgagcctttgaatttcacgttcaacgtatgttccggtaatcctctttctccatacttcttggcgatgacgccggaaagcatagcgccgatagcacggtcggtattagctatcgtatattccagagaaatctctttctcatgttcaatagccgcctgagctgcatcaataatcgtcacatcctttacagtagaaatagcatggtcctggtcaatgacgtggcggatagctgcactattgtcaatgcgtgtcagtaatcttgtgaaatcaattaatgcgtgcttcggattcgggtcgtccgtccccgatttacgttcaatcaaatcagtccgtccgatgatgtcgtccatttttgtgaatcccatttcagccagatattcccggacttcctgtgccaggaaagtgaagaaatttactaggtattcgctacggccatggaagcgtttgcgcagttcctcattctgggtggcaactccaaccggacaagtattttgatgacatttccgcatcatcacgcaacctagtacgatgagggcggaagtggcaaaaccgtattcttcggctcccattaatgccattaggataatatctcgtccggtttttaactggccgtcggcttgcagtactacctgtccgcgaagtccgttcaagactaatgtctgctgtgtttcgcttaatcccagttcgggagagatacctgcataacggatagaagaagcgggcgaagcccctgtaccgccttccgctccggagatcacaatcaagtccgctttcgcttttgccacaccggcagcaattgttccaacgccactttccgctaccagtttcacgctgatttttgcttgtggatttatgttcttcaaatcaaaaatcagttgagccaaatcttcgatagaataaatgtcgtggtggggaggaggagaaatcagcgaaattcccggaatagagtgacgtgttttggcaatcacatcgttcactttgaatccgggaagttgtccgccctcgcccggtttggctccttgggcaattttaatctgtatttcatctgcatttaccaaatattctgtcgtcacgccaaaccggccggaagctacttgtttaatagcacttcgcatggaatttccatcaggtaacggctggaaacgggcagcatcttcacccccttcacccgtattgctgcgtccgtggatcctattcatggcaatagctattgcttcatgtgcttccttgctgatagagccgaaagacatggcacccgtaacgaagcggcgtaagatgctttccaccggttctacctgttcgatagaaatcggattacgacggaactttaagaaatcgcgcaggaaaataggtttttccttttcatctaccaagtgagtgtattccttaaatttcttgtaactacccaaacgggtggccaactgtaatgtactgattgtttcaggattccaggcatgtttttctccgtctttacggaaagaatacaaacctttattcggtaataatccgcctgcctctgctgcaaatccttcattatggaaagcaatggcgtctctagctacctcctccaatcggatacctccaatcggtgaacctagtcctccgaaatatgctttgctcagttcttcactcaaaccgatagcttcaaagatttttgctccccggtaagaacggatcgtagagatacccattttactcataatcttgaaaagtcccttgcagattgacttgatgtagtttttctctgccgtggcataatctagttggatatctttgttttttaccaacttatcaagaatagcaaaagccatgtatggatttagggcgcttgctccgaatcccagcaataatgcagcgtgcatcacttcacgtatttcaccgctttccacaaccagcgctgtctgtacgcgtttccctacagaaattaaatgatgatgaacggcactcactgccagaagtgaaggaatcactgcatgagtggcatctacattccggtctgtcaggacgatatagtttactccttctgttacggaggcctccgcctgtttgcaaagttcggtcagtgcttcctgtaatccggctttccctttggctacttcaaacaacatcggcagtttgacagtcttaaaacctttatagcggatattgcaaaggatatccagctgtgtattgcttaggatcgggtgattcagacgtaccattttacaatggctttcactaggtgtcagaatattcataccgactgctccgatatattccgtcaatgacatcaccaattcctcgcgtagcgggtcaattggcggatttgtcacttgggcaaattgctggcggaaataattgtaaagcaactgcggcttgtccgagagtacagccagcggagtgtcgttacccattgaatgaatcggttcggctccggtacttgccatgggtataatcagtttctcgatatcctcctttgagtaaccgaaagtacggagcatccggtcgtaattctctacatgatgaggcattttgcgtccgcttttcaattcatccagttcgatacggtttgtagacaaccagatacggtacggttttgcttccgccagttgtttcttcagctcaccgtcataaaatatttcgcctttttccgtatcaaccagtagaattttacccggttgcagccgtcctttctctttgatatctcccggttcgaaatccattacaccgacttctgaggcaaccaccatcatatcattttgggtaatcaggtaacgggcggggcgcagaccgttacggtcgagcataccaccggcaaagcgtccgtcgctgaataacaaggcagccggtccgtcccaaggttccattagtatggaatgatattcataaaaggacttcaaatcttcactgatagggttcttctcattgaaagactccggcacaagcattgccattgcgtgaggcaggctcaatcctgacattaccaaaaactccagcacgttgtccaatgaggcgctatcactcatgcccggctgtataatcggacggatctctttgatatccccgagagtgggagaggagagtacactttcgcgagcttccatccacccgcggttgccgcgaatcgtattgatttcaccattgtgtgccaaaaggcggaaaggttgtgccaatccccatgtcgggaaagtgttagtactgaaacgggaatgcaccaaagccaacccgctggtgaagtaattgttcgtcaggtcgggataatagttccgtagctgcaatgacgaaagcatacctttatatataatactttttgtagagagcgaaacgatgtaaaaatcctctttcgccggaatggctgacattctgactttattttctattcttttacggatcagatacagtttgcggtcggcagtttctgtctcagtaaatcccgtgataaatacctgtttgatatccggttcattagccaaagccgcttctcccagaatttccgggcaagtaggtacattacgcagatgcatcagcgtaagtccttctttttcgatttcctcaataatgatgctcaaaatagttgcctggtctttctcttttttcggtaaaaaaagcagaccggtgccataacgtcccttttccggaacgggaataccctgcaataaaataaactcatgcggaatttgtaacataatgcctgcaccgtccccggttttgttgtctgcaccttcggcaccgcggtggcgcatattctctaatacttttaaagccgactcaacaatgtcgtgtgacttttctccgtgaatgtttaccagcataccaacaccgcaggcatcatgttcgtatgccgcatcgtacaggcctggctgtttgggatgtcgttggtaagggaatccttttgctctgttgttaaaaagttcttgtttcttcattcttactatctttattgtatgataatacctgtttggtgtatcaaaatgtttggcaaaattaaaaatttaatttcataatgatactaaattctatcatttctatgacacgaaatgagaagcctattctatattcttttaatttgtaatcaaaatcgttggcattgcttttaaattgttagtctgttgcctattattttaagatgattgtaatttgtttctttttgagctaaaaataatatattatttaactttttgatgtatttgcaacttttttgtgcgtttctgtcaaataaatatcgaatttataatctttatgttatttgaaatatgtatatttgcaaccaaaataaaaacgctataatgtgcgtggaatggtaggctatattggtacaagaaaagcctttcccagcctaataaaagggctgaagtatcatcgaaaactatgttgttttcaaaggaaaacttcaagcccaaggaaatacagtcatcaacaaaatcgccgattgtagtatcgaatttcccgaaacaatcgaatgcctcgatctgttgattactacggtacctcttcagttgcctgcttaccatattgcggtttgcaagggaatggatgtaggccagcccaggaatttggctaaatcagtaacagtggagtaaaacttgtaacttataacaggtaatttggatttgtataaatggaacaattgaaacatgaatgtggcgttgccatgatacgcctgcttaaaccgctggagtattacgagaagaagtacggaacgtggatgtacggtctgaacaagctttatctgctaatggaaaagcagcataatcgtgggcaggaaggtgcgggactggcttgtgttaaactggaggccaatccgggtgaagaatatatgtttcgcgaacgtgccttaggttccggtgccattacggaaatctttgagaatgtacagaataatttcaaggatttgacttccgaacaattgcatgatgcagagtttgccaaacgtacattaccttttgcgggtgaaacgtatatggggcatttgcgttattcgacaaccgggaaatccggtatctcttatgtgcacccgtttttgaggagaaacaactggcgtgccaagaacttggctctctgcggtaacttcaacatgacgaatgtagatgaaatttttgcccgtatcacagccattggacaacatccccgtaagtatgctgatacctatatcatgttggaacaagtggggcaccggcttgatcgtgaagtggaacgtgtgttcaaccttgccgaggccgaagggcttacaggcatgggaatcaccaactatatagaagagcatattgatttggctaacgtattgcgtacctccagccgtgaatgggacgggggatatgtcatttgcggactgaccggaagcggtgaatcttttgcaatacgtgatccgtgggggatacgtcctgctttctggtatcaggatgaagagattgctgtgttggcttccgaacgtccggtcattcagacagcttttaatgtccctgtagaagatattaaagaactgcaaccgggacaggcattattgattagtaaagaaggtaaactgcggacatcacaaataaacaaacctcgtgagaaacaggcttgttcattcgagcgtatctatttctcccgtggtagtgatgtcgatatttacaaggaacggaaacggctcggcgagaaactcgtgccgaacattttgaaagctatcaacaacgatcttgaccataccgttttctcttttattcccaacaccgccgaagttgctttctacggaatgttacagggactggatgactatctgaatgaagaaaaagtgcagcaaatagctgcattaggtcataatccgaatatggaggaactggaagttattctttcccgccgtatccgcagtgaaaaggtggctattaaggacatcaagctccgtacgtttattgccgaaggaaacagccgaaatgatctggcggctcatgtttacgatatcacttacggaagccttgtttccggtgtcgataatctggtgattattgacgatagtattgtgcgtggcacaacattgaagcaaagtattatcggtattctcgaccgtcttggtccgaagaagattgttatcgtttcttcttccccacaggtccgttatcccgattattacggtatcgatatggcaaagatgagtgagtttattgctttcagagctgctgtcgaattgctgaaagagcgggatatgaaagatataattgcgtctgcctaccggaaatccaaagatcagataggtttgccgaaagagcaaatggtgaactatgtaaaagaaatatatgcacctttcacggatgaggaaatctccgccaaaatggtagaactattgactccgaagggaacgaaagctaaagtggaaatcgtctaccagccattggaagggcttcatgaagcctgtcccaattatcggggcgactggtactttagcggcaattaccctacgccgggtggcgtgaaaatggtgaatcaggcattcatcaattacatagagcaactgtatcaattctgacaatcatacaacgattcaaaaataagaatgagaaatgtgacattaatccttgacgacgggagccggttttccggcaagtcgtttggctacgagaagccggtggcgggcgaagtagtttttaatactgccatgaccggatatccggagagtctcactgacccttcgtatgccggacagttgatgactcttacctatccgttgataggaaattacggagttccccctttttcaatcgaaccgaacggactcgctacttttatggaaagtgagaagattcatgcggaagcgattatcgtaagtgactattcttacgaatacagtcattggaatgctgttgaaagtctcggcgactggctgaaacgtgagcaggttcccggcatcacaggcattgatacccgcgaactgactaaagtactccgcgaacatggcgtgatgttgggaaagattgtttttgacgatgaaccggacaatgttcttgaagctacttatgcaggcgttaactatgtagataaagtaagttgcaaggaagtgattcgctataatgaaggtgcggataaaaggaaagtggtattggtggattgcggtgtaaagactaatatcatccgttgtctgctgaaacgtgatgttgaagtgattcgtgtcccttgggattatgacttcaatggactcgaatttgacggattgtttatttccaatggtccgggcgatccggatacctgtgatgctgcggtgcaaaatatccgcaaggcaatgaaaaacgaaaaacttcctatcttcggaatctgcatgggtaatcaattactctcgaaagctggaggtgccaaaatatataaactgaagtacggacaccgtagccacaatcagcctgtgcgtatggtaggtacggaacgatgtttcatcacttcccaaaatcacggttatgccgtagataataatacgttaggagcagattgggagccgcttttcatcaatatgaatgacggttctaacgaaggaattaaacataagacgaatccttggttctcggcacaattccacccggaagctgccagtggacctacggacacggaatttctgttcgatgaatttgtaaacctgcttaaataaccgacaattatgaaagaaaatataaagaaagtattgctgctgggttccggtgccctaaaaatcggtgaggccggtgagttcgactattccggttcgcaggcactcaaagccttgaaagaagaggggattgaaacgattctcatcaacccgaatattgctacggtacagacttccgaaggagtggcagatcagatttacttcctgccggtgactccgtacttcgtagagaaagtgattcagaaagagagacccgaaggcattatgcttgcatttggcggtcagaccgctttgaattgcggtgtggctttatataaggaaggagtccttgaaaaatataatgtaaaggtactcggtactccggtacaagctattatggataccgaagaccgtgaacttttcgtgcagaaactgaatgaaatcaatgtaaagactatcaagagcgaagccgtggaaaatgcggaagatgctcgtcgtgcagcaaaagaactgggttatccggtgattgttcgtgctgcttatgcattgggtggtttgggttccggtttttgtgataacgaggaacaactgaatattctggtagaaaaggctttttccttctccccacaagtattggtggaaaaatcactccgtggctggaaagaagtggaatacgaagtagtgcgcgaccgcttcgataactgtattactgtttgtaatatggagaatttcgatccgctaggtatccataccggtgagtctatcgttattgctccgtctcaaacgcttactaacaaagaatatcataaacttcgtgaattggctatccgtatcattcgccatatcggtatcgtgggcgaatgtaacgtacaatacgctttcgatccggaatccgaagattaccgagtgattgaagtaaatgcccgtctttcccgttcatcagccttggcctccaaagcaaccggctatccgctggctttcgttgccgctaaattaggattgggttacggacttttcgatttgaaaaattccgtaacaaaaacgacctccgccttcttcgagcctgctctggattatgtggtctgtaaaattcctcgttgggacttgggtaaattccatggggtagacaaagaattgggttcttcaatgaaatcagtcggtgaagtaatggctatcggtcgtacttttgaagaagtgatccagaaaggtcttcgtatgataggacagggaatgcacggatttgtggaaaacaaagaactggttatctctgatattgacaaagcacttcgtgagccgaccgataaacgtatttttgtaatatcgaaagcattccgtgccggatacacaattgatcaggtacatgaactgacaaagattgacaagtggttccttcagaaactgatgaatattatgcagacttccgaagaactgcacagttggggaaacaatcacaaacagattaccgacttgccgggagaattgctgaagaaagcgaaagtgcaaggcttctccgatttccagattgcccgtgccattggttatgaaggtgatatggaagacggcattctctatgtccgtaatcatcgcaaacgtgcgggtattcttcccgttgtgaaacaaattgatactctggctgccgaatacccggcacaaactaattatctatatcttacttatagtggtgtagcaaatgacgttcattatctgggtgaccataaatctatcgtcgtactaggctccggtgcctatcgtatcggttcttcggttgagttcgactggtgtggtgttcaggcattgaatacaatccgcaaggaagggtggcgcagcgttatgattaactataatccggaaaccgtatctacggattacgatatgtgcgaccgcctctatttcgatgaactgactttcgaacgcgtaatggatattctggaactcgaaaatccacatggcgtcattgtatctaccggtggacaaattccgaataatctggcattgcgcctggatgcacaaaatatcaatattctcggtacaagtgccaaaagcattgacaacgctgaggatcgcgagaaattctctgccatgctcgaccgtattggtgtagaccagccgcgttggcgtgaactgacttctatggatgatatcaatgaatttgttgacgaggtcggttttcctgtacttgtccgtccgtcttatgtgctttcgggtgccgcgatgaatgtttgctccaatcaggaagaactggaacgtttcctgaaactggcagccaatgtatcgaagaaacatccggtagtagtaagtcagtttattgagcatgccaaggaagtggaaatggatgccgtggctcaaaatggagaaatcgtagcgtatgctatcagtgagcacatcgagtttgccggtgtgcactccggtgatgcgaccattcaattcccgccgcaaaagttatatgtggagacggttcgccgcatcaagcgtatcagccgtgagattgccaaggctttgaacatttccggtccgttcaatatccaatatttggcaaaagataatgatatcaaggtgatcgaatgcaacctgcgtgccagccgctctttcccgtttgtcagcaaggtattgaagataaactttatcgaactggcaacgaaagtaatgcttggcctgcctgtcgaaaaaccggaaaagaatctttttgaactggactatgttggaatcaaggcttcccagttctccttcaaccgtttgcagaaagccgacccggtgttgggggtagatatggcttccaccggtgaagtcggttgtataggtatggatacttcctgcgctgtactgaaagcaatgctttccgtaggttatcgcattccgaagaagaatatcctgctttctacaggtacaatgaaacagaaagccgatatgatagacgcagcccgtatgttggtaaataaaggatataagctctttgctacgggcggtacgcacaaagcgcttgccgaaaacggtattgagagtactcatgtttattggccgagtgaagaaggacatccgcaagctttggaaatgctccatagtaaaaagattgatatggtagtcaacattccgaagaatttgacagccggagagttggacaacggatataaaatccgtcgtgcggctatcgacctgaatgttccgttgataacgaatgcccgtttggctagtgcatttattaatgctttctgtacaatgagcattgatgatattgctatcaagagttgggcggaatataagtaatataataagttgttatataataagtagaagaagtcgtctctgttttttcaggggcggctttttttataaaaatattgcaaaaaggataattggcttagtctccgtgctcatttttttatgctcgaaaattagttgcattcaaatattcgttttacctttgacagaaattgtcaacgtgtaaagtaaatggagtcattgagtcagtattcaaaagatgttcgtgaggaattgaaattgtcattacaagaagtctataatcgaactgatatagatgtcactctttgggggtataagatgtttgatttggagagtcgtagatatattggaaataaagcaaagttaaccccttggattatgaatataatcaacgagcatacaggaggctttgaatcattttttgatgtctttgcgggaaccgcatctgtttccaaggctgcgataccttatgcaaagagaataataatgaatgactttctgtcatctaacaatattatatatcaagccttttttggttccggagtttatgatatgaataaacttcattcaatcatagagtattataataatataaatcctgacactattgaagacaattacttttcggataatttcggagataagttctttgattacaagaactccaaattgataggtcatataagggaggatgtcgaaaggaggaaagtggcattgacgcataaggaatatgccattctattgacctctttaatatatagtattgataaaatagcaaatacagtagggcattttgatgcatacatcaaaaaaaacatcctgtatcatcctttatccatacaacttattagaccacttgatcctcagtgtgtagaaatctttagagaagactccaatatacttgctgaaaacatcacggcagatgttgcatatattgacccgccttataactctcgtcaatatagtagattttatcatatttacgaaaatctggtaacttgggagaagcctgaattgtttggtgtagcgatgaagcctaaagcacaaaatatgagtgcatattgtacctctagtgctcccgttgcatttcgggatcttataagtaaattgaacgtcaagtatattgtcgtatcatacaataatacatacgaatcaaaaagcgggtcatcaaaaaacaagattacattagagcagattaaatccattttagaagaacgcggtactacaaagatatatgattgcgatcacagatattttaatgcaggtaagactaattttgcaaagcacaaggaactattatttatcacggaagtagggcaatgaaaaaaaagatagtaagatcaccttttttctatgttggagacaaatataagctcattgaagaaattagctcgtatttccctgacgacatagagaaattcgttgaaccgtttgttggcggagggtcggtatttatgaatattgacgctcggaaattttacctgaatgatatagatgtaaatgtaattgcgctacacaaattcttatgtaaatctgccaataaacgaactgaattttttagtcgaatagaaagtcttatcgctgagtatggactatcatattcatataaggaagatcgtattccggtagaacttaaacgacagtataaaaaaacatattatgctaaatataacaaagaagcgtatgggcagatgaaaagggattttaatgaatcgtcggtagcagatttatatgttttgtatcttctgttgatatatggatttaatcgaatgctacgattcaataaaaatggagacttcaatcttcctgtaggcaatgttgattttaatgctaatgtagtaaatgctctagaggcatatttcatgcaagtaatatccaaaaaacctaaatggtttaatatcgattataaagatttcctacaaaaaataaggttgtctgaaaaagattttgtatatttagacccgccatatcttatcacatttagtgaatataataagttatggaatgagcaagatgaaattgagttgttgcaattattggatagcctaaacaaacgacgtattcggttcgctatatcgaatgttactcattacaaaggtcgatgtaacaatctgtttatagattgggcatgcaagtacaatgttcatccgataaagagtaattatataagctatcacgacaattcaacaaaacaaattagcgaagtattaatcacaaattactaatatgcctagaaaacctgaatataagccgttgctttacacgactacgatacgaaatcctgagcgttttaaagatttcatgcacatacttaaacggttcaatggccggatacttaataataaaacagtcgagttgttcgagagagaactgtttaaggttggcttgtatcgaccaatgaagcgcccggaaacagttcaggataagtggaaatcaacaaagaacggggaattagccagcaaaccattaacagatgaagaaacgaaagatgtgtatcagcagaatgatccccaagtcaacaaaagtataaagggacatcaagaagcagggtttcctaaagggtggccgagtcgatttgacacacaattcaaattgatgaaagttctgggctttgtatattatgaatggggaaagcctataaacttctctcaaacaggtaactatcttgcagatactgtatccattgaaatagattcaggagcaatatctcgcgagattgtaaatccacagaatgagcaaattgcatttatgcaggcttttgccaagcaacaaagatgcaatccgtttatttgtgaattaaatgataatattccactgatattattgcttgaagttataaagaagttaaactctgatccagattataatggttcgggaatctcatataaggagatacctttagttatcttttggaaagataatgatgcggaatctttgtatcagcgtattaaacttctgcgaaaggaacataggtacaatccttcaaatgaagtgatagaggatatatgtgtaaacgaaatacttgggggattcaagaaatttgatcttgactctattgtgtccgaatatcccgatgaatttgtccgcaaaatgagaatgacaggacttatatcatttagagggggtggtcgatttatcgacattaaccataatgaagatgataagataaattatatactggctaattatgccacatatcgcaagtacacttcaaaagaagaatattttgactatatgtcagacattgatgatgcattgtttgcattaaaagctgtcgaaatccccaaaaatgtcgcagctgataaattagctaaactcgtgggtgattactcatgggattctattaaaaaagaacttacccatttggcgaaaaaaacatcatcaagccacaatattttaaggtttattgcagctccggcaagattagagttcctgaccgcccttgctattaagtcaaaactgcctgctgttgaggtaattcccaattatccatgtgacgatgaaggtctgccaacctctacggctggtggggatattggagatattgagtgtttcgaggcttctaacagtatattggtggaagtcacaatgtctgaagggcgtcagcagacaatgatggaagtatggcctattgcgagacatttaaaggagcttagagaaaaatatgaatgtgaaaatttccaatgtgtgtttctggcaccaagtatatttgttgattctgagaatcagatagactgggttaaggataaaaagcagcttgttattcgtccatacaagattgtagattttattaactatctggatacagcagcatctttatatcagattgtataaggttactaaaaacaatataagaaaactatagaaaagcaccttcttgtttggaaatttgtttaaattctcgtattatcgaattcatttttaaactaatagtaataatatgagaaaagacggatttaccgtatgcgcaaaacattatattaagtgtttgcggcaagaagggcgttatgccactgcgcatgtttatgaaagtgcgcttcgctctttcactatgttttgtggcactgcgggtgtatcattcagacagatcacccgtggaaatttaaagaggtatagcagctatcttatggattgccatttgaggcttaataccatttctacctatatgcggatgttgcgctgcatatacaataggggagtagatatgcatcagaccccatacgttcatcgtatgtttcgtgatgtgttcaccgggatagacactcgtcagaagaaagctattcctataaacgagcttcatacgttactcaacgaagacccgcaatctgataagctgcgtcggacacaagccattgccaacttattgtttttattttgcggaatgccttttgttgatcttgcctatttggaaaagtcaaatttggaagggaatatgttgaagtacaaccgtgccaaaaccggtattcctatgaacgtagaaatattggattcggcagcaactatcatttcacaacttcgcaataagcatacaacagttcttcccgaacatccggattatctgttttacatattgagtggaaagaataagaggagtgatgaggcgggttataaagaataccaatctgctttacgttgtttcaataatgatttgaagagtttagccagaaagttatgtattcgctcctctgtaacctcttatacattccgtcattcatgggctactacggcaaaatatcgtggagttcctatcgaaatgataagtgaatcattgggacacaaatctatcaaaacaacacaaatctatttaaaaggcttcgaactgtcagaaagaactaaagtaaatcggttgaattattcttacgtgatgaacttcaagactatctagttgtatgtgtgtaaactgttgataaatagtatgcttagatgaatgttactttaaaggtaacggaaatatttcgatgcaaatataggtaaaaatattaatagcatacaagtaaactttcctttttttcctttttctcttgaaatatgcgataaaaaagctgctgaacatgaaaatatgaatttcatgctcaatggattttattgcctgaatccgaatgatttctgcattgaatatcagacattccccggttttacgtcctccttgttagtataatttcctttttcattgctgtcatgtctcctatgtgtatgatccgttacctttaaagtaacggataaaattggggtaaaaaaaatatgatttttcaagaaaagaagtcagtcaatgccgggcctagttgtgggacaggggaaggcgtagcgcactcaaaacgttggtatgtcgctctcgttcgtatgcatcacgagaagaaggtatccgaacgtttatccaaaatgggaattgattcttttgttcccgttcagcaacagattcatcaatggagcgaccgtcgtaagctggtggataccgtcttgcttccgatgatggttttcgttcatgtgactcccaaggagcgtatggaagttctttccttttccactgtcagccgttatatggtgatgcgtggtgaaagtactcctgccgtaattcccgacgagcaaatggcccgtttccgtttcatgctcgattattctgatgaagccgtctgtatgaatgactctcctttggcccgtggtgagaaggtccgtgtcataaaaggtcctttgagcggccttgtcggcgaactggtgactgtcgggagtaagagtaagattgccgtccgtttgaatatgctcggttgtgcctgtgttgatatgccgatcggttatgtagagcctattcacttaatcaatgatactccgaaagtttagtgttcaacatacgctcttgaggcgtttctattaaaataactttaacgggtgcaggaactatgctgtatgattcctgacaaaatcgctttggctacggggcaatgttaaatctagaacaaatttttaattcaactcagtttagggcacttccaactgccctttcaaaggggggtgccctaaattgagtgcttacaacggctatactgacaccatggaaaagatgttgcgccggctggagtacgacctttattattggggccaccgttcgtggctgttcgatttcaagattctgctcaacacgttctgttccaacgtatttggcaagaagttctgaagcatttaaatatgaattaaaaaatggagaaccaaattaaggccggagccgctcttaactacgtcataataggaataaatgctttagtaggattactatacaccccatatatgttacgtatgttgggacaaaatgagtatggtttattctcactggttgcatcagtaatttcctatctgaccattttggatttcgggtttggcaatgctatcgtaagatacaccgcaaagtttcggacggaaaacaaaacgactgaacaatatgaaatgtttggaatgtttttgaagttgttttgtgccataggtctatttgctttgtgtattggaataatcctttgcttcaatgtggataatctattcgacaaatccatgtcgccggaagaactgtcgaaagcaaaaattctactgttaatattattgataaatcttgccttgacctttccgcttagtgtttacggatcaataataaatgcgtatgaaaattttattttccaaaaattagcccaaatagcccgtatcgttctatctaccattgtaatgattgtgattttaagattggggtataaagctattggattagtagttgtacaaaccatattcaatattgcatttctgttcggcaatgctttttattgccggcataaactcaaaataaagattgtctttggaaaaatgaattggaattttttcagagaaatcctattttactctttttggatttttcttgcggctataaccgaacagttttattggaactcgggacaatgggcattaggaatctttcaagggacaacaatggtagcgattttttcgttagccattcaattaaagggaatgttttatctgttttcttcggccataagttcagtattccttccaaaggttacacggatggttacttccaataccactgccaaagaaatatcggatttattcataaaaacaggacgaatccaatatgcggtaatatcgtacattatagtgggttttgtgatattcggaaaatcatttataaccctttgggtgggtgaagagtatatgtctgtctactacattactttgatgatttttgtatgtaccacaatcccctcaatacagaatctggggaattccatattgatggcatacaataagatgaaaaggaaaacgattattgtgatattcgcttcattattgagcttcgtcgccatattcccttgtgcgaaatattggggtgccgtggggtgttctttccccattttcttatgcatcgtaatcacatacggaccgatattgaacaagatgtatgcccgggtaatcggaataaatgtacggcagttttggatagaaatattaaagatgtctttggtgccctcattgtttgttgtagcaggtctgttgatattgccatatactgatttttccgattggggcaaattgggcttgggtattatcgctttctctgtgttttatctgcctgtatcatacagactgtctcttaacaattatgagcggaactattttaattcatttatgcgaaagataaaatttgtgcgatgaaaatcttgatattaggaggaacaggtgcgataggtactccacttattgccattttgagacaaaatcaggacatccaaatttgtgttacgtctcgttcagagcattcatcagaagaaaatgtacaatatttgaaagccgatgtactgaaccaaagtgaactggaaaacatccttatgcggaatcattgggacgctgtcattgattttatgatatatagcgaatcggtattccggcaaaggattggtttgctgctaaagtctactgatcaatatttctttttgtcatcggctacagaatactctgatttggatgagataatcacagaaaagaccccacgtttgctcgacgtaactaccgataaagagcttttggcagtaaagccatatccgataaacaaggcgttatgtgaaaatatattgcgacagaccggattgacaaactggacaattgtaaggccctatataacttttaactctaatcgtttgcaactgggatgttatgagaaagagttgtggttatggcgctgtcttaacggtggagaggtcttgttcagtaaagatatagcacaacaatacaccacacttacttttgcgaaagatgtagcttttgccataagtaaactgatcgggaatgacaaagcgttcggcgaggactttaccataacaacgaatcaatcgttgaagtggaatgagattctcgatatatataagatggttcttcttcgtgagcgaaacataaaaatgcgtgtaaaatggacggatgaaagtttgaatctcaggttcagacaagggcaatggcacgcaaagtacgatcggctttacaacagaagattcaataatgccaagttgatgggcgttttgccggatttgaaatttacggaagtgaaaaaggggttggagcattgtcttaccgaattccttaaaagggaaaacttcaggtcaatcccggctccttgtcatgcccggcttgcaaattcgtatgtaccattgcaaaatataaggggtattaaaaacagagtaaaacaattgcttgtgagatatatgccaaaaccgttgtttaatcgcatatttttggttatcggaaaataaatctatggaaactaaatattatagcgctgaacgcaatatgcaaatccttgtttctcttttgaaacaacatggaataaagaaaatcatcgcttctccgggaacaaccaacatgccattcgtggccagtgtccaatatgacaaatggttcgatgttatctcttgtgttgacgaacgttctgccgcatacatggcatgcggcttagccgcagaaagcggtgagccggttgttatcacttgtacgggtgcgacagcttcacgagactatttcccggcgataactgaagcgcattaccgcaaattgcctgtacttgccataaccggtgcccgtgaggtggatacatacggacacttaaatcctcaaacgatcaatcgtttgagccatccgcaagatacatacgtttgcagtgttcatcttcaattttgtaaagatgctgatgatgaatggggcaatacgataaaagccaacaaagccattcttgcgttgcgccgtaatggtggcggaccggcacatattaattgtgtgacgcttgtgtccggtgattatactgtgaaagaaattattccggccaatgccatattccggtttggctgcactgacgttcttcctccattaggcgatttcgcgcgtatagccatattcgtgggtaaccattcacggttcacttcaggcctgacagaagctgtcgatgccttttgcgagaaatacggtgctgtggttttttgcgataatacgagtggctataatgggcggtttaaagtgttgctccccttattaagttctcaatcgcaaaaagattgtgagattaatcatgtaggtctcctcatacacatcggagaagtgtccggagcatatatgaaggctttcccacaagaagtgtggcgggtaaatcctgacggtgaacttcgcgaccattttagaaagttgaaatatgtatttcaaaccgaagaagaatggtttttccgtcattatgcttctatggatgtcccggcaaaagcaaaaaacactttccttgaagaatgccggacggaaatagagactacacgcgccaaaatcaatgtcgacgccatacctttttcgaatatctggatggcaagccaactatcgggaaagctgccggacgaatcaattctccatgtcggtatcttgaactctctgcgttcatggaattactttaatattcccggcagcgttcatttccaatgtaataccggcggatttggtattgacggacctatatcggcacttgttggagcttcatttaatgccccccaaaaaatatcttttttagtggtgggcgatttagctttcttttatgatctcaacgcccttggcaaccactatattaaaaataacataagaattcttcttgtaaataacggagaaggaatagagtttaaaaattaccttcatccggctttcaagttcggtgatgccgccaatgaatattttgcggctcgtggtcatttcggcgcgcaatcgccgagattggtccgtgattttgccggtgctttaggatttgaatatcgtgcgtcaaccgataaaaacagttttcttgagaacatagattggttcacatcctgcaaactgacggacaaacctttggtttgggaagcttttaccaacgaagtggacgaaaacgcctcgattctgtatatgaacacattgaacgaatcggcgaaaggcattgcaaaaagaatcgccaaagccattctgccggaaagtgtccagcgaaaaataactgaacacatcggtcgcactaaataaaaattatcaattatgcacaatgtaaatatcctcaccatacacaaagaaccgaactatggagctgtactacaggcatacgccttgtacaagacaatagagaatctcggtcatgtaccctacatcatcaatttggacatggattacagacgtttcccttacagcctcaaatacagggtattgcttggtctgcataagtggatgaagggatactcacattgttttgcgctggcggagcgattcagcaagaagcattgtcccaatcagataggtaattttcatactacagctgagctggagtcctacccgtggaataagggcgactattatctgataggcagcgaccaggtttggaatccggggataacccagaacttacggacagctttctgtttttcttttctgaagaacgatgtaaaaaacaggtatgcatacgcggccagtttcggcaacatcaaggacgaggagagaagaaaatccgaattggatatgaaagccctctctttattcaagagaattgcagttcgtgagaaattcggggtagagtttctgcgacgtaacgggattgatgcggtggaagtgattgacccgacattgttgcttgaaagttacagagacttattgccgcacaaagtggaagaaagaaacgagatattgtttctttcattatccgataccgcagaaatgaatgcttttgccaaagggttatctgttaagacaggacttcctatccgtaagcattacgggtatttgcaaccggaacgaaagaaaaacatgaaatttctttccatagaagaatggttgtatgccatagcttccacaaaagtagtcataacggacagctttcacgctaccgttttctccatattgttcggcaagccgttctatgtatatatcagtgagccttccaaaatctttagaatatccaacctattggacattcttgggatagaacagcgtgtcgtcaccgatgtggatgccgccattacggctcccaccatcaattatgaggaggtcaacaaacggctttccgcttatcgggaaagttcattgaattacttgaaatccatactcgcatgaaaatagcaatctgtagtgtgcaggagttcaatcctactatcggagggattgagcgtgtttctgtttcattggccgagggactgataaaggaaggggtagaagtgctgtttgtcgcttgtcgtaaatctccttacagcaaaccttatacactaccagccaaacaagtgcttctacctaaaactttggattattgcatcgagaacgtacaggcgttggcacatattctaaaagaggaaaaggtggatatattgttgaatcagaattcccattcggaactttataaccgtacttgttatgaagtaaaaagtttgtccggtgtgaaactgatttctgtattgcatttctcgccagatatgcgaataaaaggaaatagaaatcttgtgagtttcaaatatttgtctttaaaagagaatattattaatcttttgcgggatgtatgtacacgtttccctctccgttacattttcatgtatgatcaatgtcggatgtacaagaatctgtatcttaatagtgacaggattgtattattaagtaatgaatttaaggaatcatatatcaaattgtctggtataaaagaatcctctaaactaacagctattaataatatgttatcatttccctatgagatgaataactatcagaaaaagaaacagctattatggtgtggtaggctacttttttcccaaaaaaggccggatcgtattttgttagtttggaaaaagctacaagaacaattaccggattggaatcttgtgattgttggtgacggaccatttagcaatgaaatgaaacaattgagtaaaaaactatcattgcagcgtgtagagtttgcagggtttgcaaatcctatcaaatattacaaagagtcttccattttttgtttgactagcaatcatgaaggatggggacttgtattgacagaagcgatgcaattcggttgcgtacccattgcttttgattcttttgaaagcatacatgaaataattgaggatggcaagaatggctttcttgtgaagccgtttgatatggataagtatgctgataaggtattacgtttggcggataattttaaagtggattatgtgatgaatgtgatgaactcaatggaacgtcttatgcctgaaaacgtggtaaaactatggataaggttgtttaatagcgaaatgaaatgtcagttataatcctgttttgtctctcctttttgcttgttgagtatatatcttggcattttaaaggagaaaaggtgcagaaaaatacacaaatcgtcatgtgttttcttctgctgtttatattctttggatttagagacttaccaatattaaacgacacggcgcattattacagacatgtaaggcacttgttctccaacacgccattcgacaatacaccttggtacacttttgactcttcctctaatttcgaggaaggatttcagatatttcttagaattataggactggtcatttcaaaagagccgtattctctcattatcatcacttcattcataacgaccgcttccctgttatggtttctgaataagtcgacttcacatgtcgcgtttgctgtttttgtcctgatgacaagtacactcctgctcggatgttatagcgcaatcaggcagtcattggctgtatccgtgtcatatatattttattggtgctatggtgatagtaaatacttggtaacaggcatggagcgggaggcggttcccttggcgcaattgttggatacattattcatacttgcgtgcctgttgttttattatatttacggcaacaagtataaagaagagattgaaaaggacaaattatatgtttcattcgccttgtcagcattgattgtcaacatatgggcacttccatgttttagcccttttccgcttcggtatgttcttctcgcaatatgcggttgtactctttataaacagcctgtatcaggaggaagcggccaagcgattgaaaatattaaaatatgcggttgtcgcgatattggttttgcgaatactcattgtcttgatttatagagatgaatggtttcatcttgttccgtacagtttctttgatttcagtttagagcatcaaaaaacattgttcggatattagtaatagctcatatcatgtattataatggttatatacgactgtatacggtgacggtagcgacattgttcttgctgtcgccgttgctggcgttgccttacattctgttgggaatatataggcaagagcgtagcgcgtactttttctttgccttattcttaggattccttgcatggctacaagttccattgtccgacttgttcaggcattcactcaatatttatcactatttagacaaacctttctcttatgcgtatgtgaacaagcagtccgcggattactttatccctatcgtaaactggatattggtaaacggcaacattccatatcaatatctccggttgttttcagtaacagagagtttcttcttgctgacagtcatattcaattatatgattgaaacatcggagcgtgaatatacatacggggaagtcttcatgcgtttctgcatcatgtatctgttctttgagttcatcatgactaccagcggggtacgatacggttttgccgtttgtcagtatatttacgccttgcatttggtgttcaataagaagtcctggcttccggctttattttttgccttgttcgccacacaaattcatgtatcattcgcattcttcattcctataagtgtactgctgtattggctgtgctccaccaaacggaagacaatcgtatttttcggcttgctttctgttgtgttaattcctataatttcacacttcagttacttattgggacggcgcgcggactggtatttcgggggaggcaacagcggttccgaaaattttgctatcactagttgtggttttattttgggcattggggtcaaagtgtttttccttccttttttagtgcttgggtggcaagagtttacccccccccccccccccctacacacacgcacatcagagtcgcaataccaaatcactcatgcagatggacgcgtatggctgcggtgtggatagggatggctgtaatgttcattaccaatatgacaatgctgtacagactgacatttgtactttccaccataggcattttccttttactggaaatagaacagcacttctacataaggaaacggtttataacaattcttttatggtgcggaataatgacaactctgtgtaataccgtaaactatagatccattatactgaattccagatatcagtatatcgccatgccggtacctgtaatattgcaagaccattatgacaaacagtggatattagaacatgtcaacggaaataaaatgaagcaatagagtatgaaagtagctattctatatatatgtacaggcaagtacaaccaatttttcaagggtttctttgaatcgtgtgagaagtatctgctaaaggatattgcccaattggaatactatgtattcacggatgatatgtctttgtccgacgaagccaatgtacacttgataaaaaaagagtgcgcaggctttccggcagactctcttttccgcttcgatatgttcctacaagtgagacaagaattagagaagacggattatatttactttttcaatagcaatgcggagtttaaagctcctgtaggaaaggaattattgccgctgaatggggaaaagcttgtaggggcagagtggccgggcaagcgtaagcctttcaagcatccggcattttatccctacgaacgtaacaagcattcatcggcgtatatacctccccgggaagacaagccatatatctattatatgggtggaataaacggaggagaagctgccgactatttggaaatggcagaaactctgtcggagaatatctatgccgattatgaaaaaggtatcgtggcgttagtccatgatgaaagccatatcaacaaatatttccggactcatgactgcaaagtgctttctgccgaatattgtttcccggaagagtggattacatgtgatttttcacctaaaattattttccgtgacaaagtaaaacttaatccttactttaacaaaggacgtgattactcattgaaggggaaactgaaaaaaacagtcagtgtcatttatagagcgattcgctggtatctttaaaaacttatcagataatgaaaatcgtaaaaattctcggaggtctgggaaaccagatgttccagtatgccttgttcctttcattgaaagagcggttctctcatgagcaggtgatgatagatacatcctgtttcaggaactatcccctgcacaatggttttgaggtagaccggatatttgcacaaaaagcccccgtcgcttcatggaggaatattttgaaagtggcatatccatatccgaattaccggttctggaaaatagggaaatacattctgccaaaacgtaaaaccatgtgcgtggagcggaaaaacttctcctttgatgctgccgttttaacacgtaaaggagactgttactatgacggttattggcagcatgaggaatatttttgcgacatgaaggaaactatttgggaagcattctcctttccggagccggtcgacgggcggaacaaggaaataggggcactgcttcaggcaagcgacagtgtttcattgcatgtccgccgcggggattacgtaaaccatccgctttttcggggaatttgtgatttggactattataaacgggcgatacactacatggaagagcgggtaaatccgcagctgtattgtgtcttttccaacgacatggcttggtgcgaaagccatctgcgtgctttattgccggggaaggaggtagtgtatgtagactggaacaagggtgcggaaagctatgtggatatgcggttgatgagcctgtgccagcacaatatcattgccaactcttctttctcctggtggggagcttggctgaaccgcaatccgcagaaggtggtggtcgcgcccgaaaggtggatgaactcaccgatagaagaccctgtttctgataaatggataaaactataacatagaagatatgaatattgtctatctctttttgacttataaaaacccggagctgctgcttcatacaatacagcggctaaaagctcctcatgtggagttttacgtacatgtggacgcttcatccggagaggacttttcatgcctacaaggaatagatggggtgtatgtgtttgtaaatcagcataatacaaaatgggggacattgagtatttatgctatccacctaactgttattgctctacttatttcctgtcttgatattgataccctacaactgccttattggttatgtgtatgcggtatgtggataatggttttaataataagctacttgtgtcatattctaattggcaagaaccgttgcttgtctttgttgctcttaggtaagtaacaatctgtatatctacatttatgaaattctctgtatgtaagcactcaaataatggctcaaacttgaaaggttttactttcagtaccagagtgagctttgcctcatggagaatctctgcagtccttctgtttgaggaataaagttccccataacgtgttctataagtggtataaggacacttgaaaaaatcttaagaagatgtagggactatgctaatatggtttttggcaaaatcgctttggctacgagccaatgttaaatttaaaacagattttcagttttataaatctataatataatgaaggagttcagtgtattgatttcagtctatgcacgtgagcagagcgattatttaagatctgccttgcatagtgtgtttgaacagactgtgccacctacagaagtcgtattggttgaagatggtccattgacaactgagctggaggctgtcattaccgatttttgtgagaaatataacactttgaaaatagtaaagttagcgaagaatatggggttgggcaatgcgctgaatataggcttatccgcatgtacttatgatttggttgcacgtatggatagtgatgacctatcgttacctaaccggtttgaagctcaattaaaagtatttgaagaaaatccggaagtttctgttgtaggaggatggatttctgaatttgataatgatccccaaagtataatttcatatcggaagcttccacaaacagatagagagcttagaagaatgtgtcagttgaaaaatccgttgaatcatatgacagtaatgtttagtaaaaaagaagtgcttgatgcaggaggataccagcatttttacttgtttgaggattactggttgtgggcaagaatgataaagaatggggtgaaattgtataatgtacaggacgtgctggtcaatgtacggggcggaagtgctatgtctgcaagacgcggaggatggaaatatgcgaaaagtgaaatacggtttcaaagaaaaatattgcaaatgggcttaatcagtttacatgtattcttaagaaatgtatgtgtccgtttttgtgtccgtatgatgccaaacggtttgaggagtttggtatacgaaaaagtattaaggtaattctttcaattttaaaaaatatggggtatagtgaggacttcattccggacggaatgaatgcttttgaacgtaatgtaaagcgaataggggattgcattattgcgggagttttattattaatattttctccattgttcttaatctgttatctggtggtgaagcgtgaggatggcggcccggctatcttcaaacaggagcgtgtcggtcgttttggccgcccgttttatatttataagtttcgcagtatgcgactggatgctgaatctatgggacctcagttatataaaggcggaagagatcccaggttaactaaagtgggtaaatttttacgcgaacaccatttggatgagttaccgcaactttggaatgtcttctgtggtgatatggcttttataggcccccgtccggaacgtaaattttatattgaccaaataatggaacatgatccgcgttaccgctttttatatcagattcgtcccggggtaacttcgtatgcaacgctttataacggttatacagatacgatagaaaagatgttacgtcgcttacgttatgacttgttttatctgcaacatcgctcctggtggtttgattttaaaatattaataaagacctttatctgtattgttttcggtaagaaattctaataaataacagtaaaaataagatgaataaattctttttaattgtattgctggcttttgtgatgactggttgtcagtcttataaaaaagtaccctatctgcaggatgcagaggccgtatcgcatggagttcagaacgaacagctgtatgatgcgaagataatgcctaaagacttgttgaccattgtggtgtcatgtaccagtcctgaattggcagctcctttcaatctgacagttgctacacagggtaatgttgcttcgaactatacaaccgctcagccggttctgcagcaatatctggtggataatgaaggaaagataaacttcccggtattgggtgaactccatgtgggagggttgacaaagaaggcaacggaacaaatgattgtagaaaagttgaagccttatataaaggaaattcctatcgtgactgtccgcatggtgaattataagatttcagtgatcggcgaagttgcccgtcccggcacttttactatctcgaatgagaaagtaaacttattggaagcattggccatggcaggagatatgaccgtatatggactgcgtgatgacattaaattaataagggaggacgctaacggcagacaggagattgtaaccttggatttgaacaaggcagagacgattctttcaccttactactggttacaacagaatgatattatttatgtcactcccaacaaggccaaggcccgtaattcggacatcggaagcagtaccagcctgtggttctccgccacttctatcctgatttccattgccagtctattgtataacattttaagataataccggaacaatgaaagaggaactaccaaacgagaaactgcgcgaagcggaggatatggaaatagatattaaggaactgcttttcaaatgcctgatccactggccttggttcgtaggaacggtggtggcttgtttgattgccgcctatgtttatttgtatgttgctactcctgtatataacatttcggctacggttctgataaaggatgataagaaaggaggagcctcaaataatgtgggcggtttggatgaactgggccttagcggattaatcacttcttcgcaaagtatagataacgaaatagaggtgctgcgttccaagacgcttgtaaaagaagttgtcaattatctgaatctctatgtgacttataaggatgaagatctcatcccttcgaaagagttgtacaagacttctccggtgcaggtaaacatgactccgcaagaagcggaaaagctgaaaaaagacattgttgttgaaatggtggtacagccacagggcagtttggatgtgaacgtgaaaatggatgatagggaaattcagaaacatttcgaaaagttgcctgccattcttcctactgaccggggaacgatttctttctttcaggctactgattctatccctgtggagggggcttcttcagttcagggcgcacggcatatcacagctaccattagctgtcccatgaatgtggcaagaggatattgtggaaatttagttatcgtacctacctcgcaaacgacttctgtggtaacggtttccttgaagaattccagcttgcgtcgcggacaggattttatcaatcagttgctggagatgtataatcgcaacacgaataatgacaagaatgagattgcgcagaaaacggcggagtttatcgatgaacgcattggcattatctcaaaggaactggggagcacggaagctgacctggaaactttcaagcgtgatgcgggaataacggatttgagcagtgacgcgcaaatcgctttatccggtaatgccgaatatgagaagaagcaggtggaaaaccgtactcagatcagcctggtggaggatttgaagaggtatttaagtcatagtgaatatgaagtgttaccgagcaatgtcggcttgaaggacgcggcccttgccacgcagatcgaccgttataatgagatgctcattgaacgtaagcgtctgctccgcacttctacggagagcaatccggctatcgtcaatttggataccagtatccgtgcgacgaaggcgaatgtgcaggctaccattgaaggcacgctccaagggctgtttataaccaaagctgatctggaccgcgaagccaaacgctatatgcgtcgtatcagtgacgctccggggcaggaacgccggtatgtgagtatagcccgtcagcaggaaataaaggccggattgtacttgatgttgttgcagaagcgtgaagagaatgccatcatgctggctgccactgccaataatgcgaagataatagatgaagcaatcgctgatgatattccggtatttcccaagcgcggtattatttatttggttgcgttggtcttgggatttgtgatccctgttgccgttatcttcctgattgacctgacgaagttcagggtcgaaggacatgcggatgtggagaaactgacgagtgttccgattgtgggtgatatcccattgactaatgagaagaacgccaaagacggttctatcgccgtattcgagaaccagaataacctgatgagcgaaactttccgtaacatccggacgaatatccagtttatgcttcagaatgacaggaaagtaatccttgtgacttcaacggtcagcggtgaaggtaaatctttcacttcggctaatctggctatcagcctgtctcttttggggaagaaagttgtgattgtaggtcttgatatccgtaagccgggattgaacaaggtttttagtctttcgagcaaggagaaaggtataactcaatatctgtccaatccggaaatggatctgatgagtcttgtgcaaccgtccgatgtgaataagaacctgtttattcttccgggcggaaccgttcctcctaatccgacggaattgttggctcgtgatggcttggataaagctattgatatgctcaagaacaattttgattatgtaattctggatacagctcctgtcggtatggttaccgatactttattgatagggcgtgtggctgatttgtcggtatacgtatgtcgtgccgactatactcataaagcggaatatacattgatcaatgagttgtctcatgaacagaagttgcctaatctttgtactattattaatggagtagacctgaagaaaagaaaatatggctattattatggctatggtaagtatagcaaacattacggctatggcaaacggtatgggtatggctatggttatgggcaggaaaaataaagataaaacagctatgggaggcagtgaagtactatttcccgtagctgtttagatatttgaagctatgctggttaggaaactatatagtgatatatttcttgaccacaccctcgcatcaggataatgactgatgcaaattttccactatatcgactgtctgtgaagatcgttgatattttttataattctgcatattcttttcgacagtcaaaacaaggacaggctttatgaatcgaagcactaagttgataatgccccaggatttgtgctttcggatactgatgcctgagtatagttaacagatcgagtagtgtaaaacgctgcgcctgggtcctagtgtctgccgggtatccattttcatccagtccgccttcatagcaaatgcctatgctgtgccggttaaagcctcgcacatgcgcacccggctctgataccggacggcagtgatgaagttctccgtccctggtgatataaaaatgatatccgatgtatttgaaaccacgttgcaaatggcatttgagtaattgttcttctgtaaaggggatgttggcacgcgtagcgctgcaatgtactacaatatattgaatgcttcgtggcacatattcttcttctgaagaaaattcttttaactctttcatcttattcgttcgtttagatatgggctacacaagaggttacccccaaggcagagatgattgaagtggctaccgtgataaagatttgtaaaatttgtttccaaactgattttttcatgacttttgattttaaataattgaaaataaaaatgagattataaaaatagagttgacttgtgagttgccagcattaaaccggcaactctgtgaagcataaatatcgtgttattttatatgctcgggtccggtgtttgtcctttgtcttcatccggatcaggtactacaacgtcgtcaccttcacttccttcacctttctttacttgtgtatatttcattgccttacacatgtccagaagcatgcttcccggatgaaaacggacacgggaaattttgatacaggtggccgccttgaatttctctgccgtttcgctggcattaccagtaacaatcgttacacggaaactccccatatcgccaagcaggacgatattacccaatgacaactgattcttcatttccaacagaaactcagtaatacatcctttcaactcaccgatagaataagaggaacgctctgatacacgactgataacttcgtctgtatccactctgcgattgctacgagccattgcataaaacttggccggctcttgtggctttaacggatttttacgttctaccacgacatacttctgtgccataaatctttcttttttaattgattcttaattcttaaatcatatctctgtaatcgattacaccgcaaagataccatattgagaatgggtgatgaacgtcagtgaacgttattgaacggtggttattttatttgactaaatacttgctgaggtatgtaaaaaacactatctttatatcattaataacagaataagtaggataaaatggaagaagtaaaattttatgtgagatgctatgataagattgagttggcgagaatgtatttcccgaatttgagtaatcccgtatctgtagcaaagctccgtcgttggatgcgtaattgtatgcccttaatggaggaacttatggcaggagattttcatccgaaaatgaaaatgttcagtgcgcgggaagtcaggcttatcgtacgttatttgggggaaccggacggatacgttttcatgcatgaacatgcggatgtaaaatgactgctcttttaaatgaaaacgaccgcttcttttcttaataaggagcggtcgttttagtgtaaacatacagtcgtttacgttgaattgaccgctcgatttatataagtcaaacggtcggttgaaacaggtcaggcagtcgtattctttttcatccaggctatgccgggcacgtagtcctccagttttgtcatactcgggtcatgtctgaaataaagttcttttgtcgtaccgttgcggtgtttgacaatatctatcactcccagtccttcagttggatacgtacttttacggtctgtgtcacgtccggaaagagcagggcgtgaaagcatcaataccagatcagcgtcttgttcgatagctccgctttcccgcaggtcgctcaaactaggacgactgtcaggacgcccttctacattacggtttaattggctgagtagtatgacgggaatatttagttcttttgccagcattttggctttacggctggcttgggctacttcctgctcgcggttgcggttgttccgatcacttttcatgtcacataattgcaggtagtcaatgatgacaccgtcgcattcacctttgctttgtagcagtttggcggaagaacgaacgtaatccatactcactgacgggttatcatcaatgtgaataggtagacgggacaactcagctgctgcttcgtgcagttgcctctgttcactgggtgtaagttggccgctgcgtacattgtcggggttgacattggtggtagcagccagtaaccagcggtcacccaaacgttctcctagcatctcgagactgaatatagctatgtgataaccggcagaagcggcggcacgcgccaggtgcagggcgaatgacgttttacctactgcaggacgggcagcaatgactacctcgtcacctggttgccagccgcatgtcaggcgatcaagatcggagaatccggtaggaagccccgttataccattcttgttggagctgatgcgcgcttctatttgtttaatcgtatcatccatcagttgtaacatggagcgtagatgttcggtagttccacattcattttccagtcggtcaaggagggtatgagcgtctgccaatgtatcgtctatatcggtggtttcgtcggcagccaacgccagaagcttgtggaatcccagaatcgtttcacgacggatatatttctgtttaagaatccgtgcatgatattcgaggtgagcactggaagctacacgcccgctgatgtgtgccagcgtgtaaggtcctccgatgaattcaagtttgccgcgtcgggcaagttcttctttgactgttatgatatctattttctgtccgttgcgatacatactttgtaacgtagcgtaaatctccagatttttttcattataaaaagcttctggtcgtagtatatctgcaatcaatgtgattgctttgctttcaatcaggcaactgccaagtatgatttcctcaagttcggcatcctgtggatttataatttcactcattttctttactaataatcatattcattcaggaatgctttatcggatagatatgtactagcctgcatacagtactttgtatctgtcagattgtcataatattcatcaatattcttcaagctcaggctgcgttcgtggggagacaatttcttccattcccggcgtgcccggccgatattggttttcggcttttgagttacttcatgatatttagcccagaatacttcgaaagtaactccatttgcttcttcgtgggcattctcgcgacgtttctgtcctacaagcagatcataactggggatacgtatgtgagtgatatacggattaataactctttctataatcccttcttcatacattttattgaagaaatatcgtgtccggctacgtttccaaccaaataatttcgcccaatgagcaatggatatgaccgattcgccccgccgacattcaaaagtgtaatgtttcacagtacattctgttgtgctgtaattgacgtgagttagcacgaggatgaaggcgtcgaagtatcctgtcgcaccttttgtctttttcatttgctcctcaaacaatactttagggaaaaggagatatcccttctttagcatttctgctgttgatttaatcataagtttacttatttaatacatataaaatatttcagtcgtcttgggaggtacattttaggacctccttgagcgaccttttttgattactctcaaacgtcgtggtagaagatagggggagtatatggtattttatgcttcgacctctctttggcccactaatatatataataaaaaaagaatgtattaaaatacattatatcttcatcctcgactttcattgttcgctatatttaattttcggcaaaggtataatttgtcaatttgcctgaaaaagcttttttttgatgtactggtaatttaaaagtgctattattaataatatttttaattaaaaatctaattatttaaacaatcttctctatctttgcaaatgaaattagattttataaaggctttttttagccgctaattgacggcaatgtattactaatagtatataattaaattttatgatatcacaaggaaaaaaagtaatagaagaacgtttacagcgcaaacgggaacagtgcattcatcaaaaggagaaactggaacaaatgaaatgtacaatgcggaaaacagaagaagaagtagaacaattggaatatgtccttcatgaaatagagcatatagagaaatcgaaacgtgaaccacgggtgattcctaatgccgaaataagtaatgtctttgcatctctttgtcgtgaatttgattatttgcagcataggttaaagctgttttttaaatataagctggtatgtgaagttatatttgctcgttatcaattccgaagccggtcacatgttcccggacgggaatatcttagctatgccaccgtgctgacttattttaaacgtgaaagggggatggtgaactcatgatttcaaaaatatcgaaatataaagataataacatgaaaaacaaatgttttaggaacagaaatgactaaattgatattttttccttatttttgtgtgtccatttttgaatgatatgatgcagataatacaattaaaaggaaaagacaaacacttatatcggcttttggcaccgttggttatggatcctgaagtaatacgcgccaacaataattacccttttaagacgggtgaggagtatgtctggtttattgcaattgaagataaggaagtgatgggtttcgttccggtggagcaaaaaggtcggaagaaagctgtaatcaataattattatgtgaaggcagaggggacagaacgggaggagcttttgtcgttgttgttaccggctgttattgctgaattcggatctgagacttggttacttaactctgtcacgctgatacaagacaaagaaatctttgagaaatttgaatttgtatccatggataaaaagtggacacggtatgttaaaatgtatagatgatttatgggcaaaaagaagatagcgggcacaaagaatgtatatgaactagcacaagagcgactgaaagttatatttaatgaatttgataatatctatgtatcattttccggaggtaaagatagtggggtgttgctgaatatgtgtattgactacatccggaaaaataatctaaagatacgtcttggagtttttcacatggattatgaaatccagtataaaatgaccattgactatgtggaccggatactggaagctaataaggatattctggatgtataccgggtatgtattccttttcgtgtagctacctgcacttctatgtatcagtctttttggcgtccttgggaagatagtaaaaagaatatatgggttcgtcccatgcctaaaaaggcaatgactaaagacgactttccgttttataatacaacgatgtgggattatgaatttcagatgcgttttgcgcaatggatacataataagaatgatgctgtgcgtacttgttgcctgatcggtattcgtacgcaggagagtttcaatcgttggagatgtatttatatgagtcgtaaatatcagatgtaccacaagtataaatggacttcgaaagtgggaaatgacatttataatgcttatcctatctatgactggaaaacaacggatgtgtggacggctaacggaaaattccagtgggattataatgtgctatatgacctttattatcgggcgggagtcaatctggagcgtcagcgtgtagcaagtccttttatcaatgaagcacaagagagtcttcagctctatcgggtacttgatcccaatacgtggggcaagatggtaggacgagtgaacggggttaactttacaggtatgtatggtggtacccacgcaatggggtggcagtcagtgaagctgccagaagggtatacatggcgtgagtttatgtatttcctgttgtctactttgccggaacgggcacggaagaattatctccggaaactgtcggtaagtgtaaatttttggcggacaaaaggcggttgcctgagtgacgctactatccggaagttaattgatgccaaaataccgataattgtcatggataacagtaattacaaaacactaaaaaagccggtacgtatggaatatcaggatgatatagatattccggagtttaaagaaatacctacgtataaacggatgtgtatttgcatcctcaaaaatgatcatgcatgcaagtatatgggattttcaccgacaaaggaagaaatgagtaagagaagtcaaataatggaacaatatagaattatagtatcatgagtgtagataaaagtcctgtctacgaggtaaaagcggtgcccgtagaaaaagtatatgcaaacgattataatccgaacgtcgttgcaccgcccgaaatgaaattacttgaactttctatctgggaagatggctttacaatgccatgtgtatgttattataataaagaggaagaccgttatattctagtggatggttatcatcgctatacggtattgaaaacttcgcagcgaatttataaacgtgaaaacgggctgcttccgattgtggtgattgacaaggatttgtcgaaccggatgagttctactatacgtcacaaccgcgctcgtgggatgcataatatagaattgatgtgtaacatcgttgcggaacttgacaaagcaggtatgtccgatcaatggattatgaagaatatcggtatggatcgtgatgaattattgcgcctgaagcaaatttcaggacttgctgatttgtttgctaatcgtgaatttagtattccggatgaagtagcacccacagaaacggaacgaaaaacgttataatctgatagctatttatatacaaaaattgaacattctaccatttaggcatagattatataagttttcggcttttttattgtgtaaaatagtcgtttcttttgtctgatttatgcctggattgtatctaaatgatatgaaaatctattagtattttcctatctctttattttgatattcgaaactgttgttttgaaaaatatgcgaatgtcgaaaaaatatctccgattaccactttttattttatattccgtaatcccctgatttgtagttcacattaatagtcttgttttcagactcggattatctgtaacagaaatgaatacaattctgtatctcctttaatattccgaaatttgcaatatgaaatttaagtatgttttggaattggctaaaagagataaatgaatgattgttagtgagagtagaatttatataggtttagtttgctttttattattactgtctttttcttcttgtattgatgagacttttacaaataataatgaaacggaaagtacttttatttcgataagaggaataggagtgcagggtaatacacatctgggaacggatcctgatgactatatcgttgaaacccttcgtgtactggcatttgataaaacaactaaagatattgttaccaatgtgcgctatactgcatcagaaggtgatattatacgtcatactattaatccgggaacatatgactttgtttttcttgctaatgaacctgctaatatccccgttttaaatcaattgaagagtatttccaattattgtgatttagataatatcgcctatcctgaacgtttcttcacgtccgatcaaattatacccatgaaacaggagattaaacaggtcactgttttatccaacgggcaaggggcccgattgagtgacaatacggaagtaactatattgcaacttgctcttgaaagattggcagtgaggatagatgttgtattggaatcagatgatgaactggaggatattttttccggacttatatttcaaaacattccggatgcggtacctcttactaccaattatcagggagcgatagggcagagtaatatacgtacttttaaaaaggatacggatggaagttatttttcagctgagactcctactgaggggagagtatgggcaaagagagcaaaccggattattttacctgccaaagaactggaggtgacagaggacaaggcgaaggctgtggtgctcactatagatatgggaaaccactatagcccttcttgtgaactgaagattgtttcggaaccggtgaattatagcctgccgataaatacaatgttgtcattcaagggaattgtaaaagaaccgttggaggtaaatatcaaagcttccaagtggacggatgaaaataataactggaatatagatgacttgcgcatactgaatgtttcacatacgaaagtgtcgataaccgattttaatggtgctcggatttcattttcgtcaaacatgcctgtagtcagagtactgcccgaagtgtataatgtaacaaccggtgagatagtggaaactaaccgtatttttaatagcttggtagctcaaagtacaacagactggactactgctcctgaacggtttatatatgccgccaacggacaagaggggacgggatatatggaccttctggctgacggatggttgataaaggatgagatatttgactatataaagaagtctccaaatctgaccggtacatataaactgacgttatctgctgaaaatacagatggcagtaatgctttgcaaagggatattactgtcacgatagaacaaaatggaacacgtcttcaattctatcatccggctgtaaatccggcgaatggagcaacaggatatgccggagctttttggaaaaatgaccagtgtggagagcgcatcattacgggacagcttgccagagaaggggcagatgccgtaacgatagtaaattggagtgcgcgagtagatgaagaccctgataatatggtaatcctgagcactactcccagttttgatcctaatgtcggaacggctaatccgggagttgctgaaaatttccgtgtaacacccaatttgcagaaaggagaggatggcaagaatgtttccggtaaaggacgtatttacttccgtatcggactgacagaaacaaatcctgatccggctactccaaggtatgcgactgtgaaattgagatattggttatgggggtggggggatcagcctgtagaggcaactctttatttgagacagggagaaaccctggattatttatatcccggacgggtagggtcgagaaaatttgctgtttacaatatgactcacaaagattttctggctactccgatgacaaacgattttagtatcgttgtgaatagaaataatgcttcggaagttgatttcccgacaaaagcaggggcacatttccaatgggggcgactaaaagaaggagattatggtagttctcccgaagatgcagaaatggatgaggcatataacgcgcttggctatagggcattgaatccacatcctggcatgaatgcgattgggcttgaaggctggggatggagctattacaaaaactatcagtatctgacatgggataacggaattccgtcagaaagctatagtacaaacctggaaatttgtcctgaaggttatcatcgaccgaatgatggtagcataaccggaggattagtggcttcacataacagtacaactacggaagcggaggcatcagaatggagagcatccatatttaaaaatccgatgacaggtgacggtaaccaagggtataaatcggttagtccggagtctggaactcaagctagttctccttcatattatgctcctgtaactcttcctgataatatgacttttgggttctatgcagacgggtattttgatagacgtcccatagagcagaatttgattaatggtgatttgatacaatatggagttactataaaaagtgcgaatgccgcatattggggatgtatttttttcaatggagttaagtctttgttttttccttccgcaggcagacggaattacggtgtgggaggagcaaatgaagcaggggtattggaacatcctagtgccggcttttatatgacagcatcagcggctgatatccctgaaccggaaggcgctgattatgttgattggagttctgtgtggaatatagaattaagttatgaagggacagcacctgtgagcacttcatttaaaaacgggttgtctttgagatgtgttagaaataaatagagaatgaggttacagattaatatatatataatcctttggttgcttctctgcatgatttcttgtgtgaaggaagaagatttttactctacggagactgaaaacattgagcaagtcagcatagaactgtttacaaggttaaggtcatttgatactcctgtgtccagggcaatagcgctggaagatgatgtagacaaagacccctggatacttgtatttactggtggcgacggtacggctggcaatgcggtatttgcagaagcggcacaggcaaatattaatgttggaaataaaagttatgttttgcttagaccacagagcggcaaatcatgggtattgatattggctaatcctcaggataaattttatgtgggcagtatgtcttacgacttttcggttgacaattttaatgacctgttcacaaacaagacgcttactaatgtgacagctttgctttcagctatgccaatgactgccggagttgtagttaatgctccgccattcgtaaacaagatgttgccgatgagttatttgtatgaagctactgagggaattaacgtaaatacgaaaatcggtacgtctactgtacctttggaactaacacgtgcggtagccaagattgtagtaaaaagtacagttgctgatttcaccttatcagggatacactcggtgtacaatatgaataaaaatacagtattgcataatctttccggcaatttggaaactgcggcaagtatggtagattatattagaaatgatgcaaatgaggattttgtttctgcaacggctaatgtaactgaccctatatatgtatatgaagcgaaaagcggaaccggtgcctatatgataatacgtgcattttataaagggctggaatcttattataagatagcgatcgctgatgatgaactcaagtatatagacatcaagcgtaatcatgaatacagatttacaataatatcggccaattttcccgggttcggcagctatactgatgctcttttggctgagcccaataacttggctttgaaatgtaaagttgaaataatagacctttcttcttttgagattaaagccaatagcgaatattaccttgctgtaagcaatcggctttgtatgatatatgatgatatcaattcagaacatcaatatcttgcttttacgttgacaacaaattgtacttatgcacataagttttccgataagagcaattatataagagtgacgaatggtacgatgactattgttgccccggcatcccaaagaatatcttctgcctcggatccgaatacaccgttcactgtggatgtggtagtcaaacttcctaccggtagtattgacaattcgagcattaatataaaacttggtaacattgaacagaaggtcagcgtgataagaaaggatattattcctgcagcaggaatggtcgtaaattattatacgcagaattcaggtatctatgattttgactattatcttctttcggctaaaacagatacagatatatcatggattacgatgaaaaataagtatggtggcattagtggcgatcctaatagtattcaagtcggtgacggaataattgatatagatatagcatcagcttcttccgcaagaaatgccgttgtctatcttacgactataaagaatccgaaagaacctctggaagatgataaagatataccgaaacggatcaagatatatttttaccaaaacggatcttgataataaaataataaatgcattaatattaaaactaggaaatttggaaaaacaggtacacatcagacagagagatgcagtggatgctgccggaggaatatttaagtatatgcctgcttataatcataatccggcggccaaagagataaactatttttgcctgaccgagtacatagaagatggtgatgataatcctaaagattggattaaattacgtccgtcaacaatgactcatcgagataatacggaccatatcattgtggaagacggaaagatatttattgagatattgcctaataacagtgttgattcgagaagtggtattgtgtatttgacaacaataatacccaacggatcatctgtaaatggtagtactatgcaacgtatcaagattgatattactcaattgggcatataaaacagtaaatgtaagataaatgaagaagattcttatactcatattattaatgtccgggtgttttattcttgaaagctacgcccaaaaggttacgttgaaaagtaatttgttatatgatgctaccgctaccatgaatcttggtttagaattcgggctggcacgtaaatggacattggatgtaccggttaattacaacccgtggaaacccgataacggcagacgtctccgccattgggggattcaaccggagattcgttactggttctgcgaacgttttaaccgaacatttatcggactacatggtcattatgctgatttcaatatagggggctggcccgactggtcttttgtgagtgggaatatgcagcaaaaccgttatcagggacatctgtatggtgcgggattctcggtagggcattcgtggatattgaaaaaacgctggagtattgaagcgtccttaggattggggtatgcatatattgcatacgaaaaatatccttgcacaacgtgtggtacaaaatcgaaggatacgagtaagaattacttgggaccgacaaaggctagtgtgtcacttatttatgtcattaaatagtataatcatgatgaaaagaaatatatattgcgctgtatgtctgctgactgttttgtgcttggacatggttccggctacagctcagactcgttcttatgacggtactatcactgtgaaaccgatacagctggaacagaaaggagattttcttcatattgatattgattttgatttgaaagatgtaaaagtgaagtctactcgcggggtggattttatcccacagttggtggctcccgaacgtatgctgaatcttccgaaagtctctattaaaggacgtgatgaatatctggcttacgagcgttggcttgcggtgatgagtatcaaagaaaagaagaactatgataaaccttatgcggtagaaaaaggaagtaaggtgaaaaatggtgttcttccatataggtatatggtgcgttacgaaccatggatggaaaatgcacgtttggatgtgcaacgtgacgagtgtggttgcggtgagataaaatcgatgaacgtagagcgtttggtggataaagttacgcttgaacgtgtattactgccttacgtcgtaaccccccatttcgcttatttgcagccgaaggctgaagaaatcaaacagcgggacatacaagcggaatgtttcttagattttgaggtgaataggataaatatccgtcccgagtatatgaacaaccctcaagaattggctaaaatcaggaagatgattgatgaattaaagtcggatccgaatgtgaaggtcaatcggttggatattatcggctatgcttctccggaaggaacgttagtgactaacaaacgtctgtccgaaggacgtgccatggctttgcgtgattatctggcttccaaatatgatttcccgagaaatcaatattacatcatttttggtggtgaaaactgggacggtttggaaaaagcactggatacaatggaaatagagtataaagatgaagtattggatattatccgggatatacctattgaaaaaggaagagaaacaaaacttatgcagcttcgtgggggagtaccctatcgatatatgttgaaatatatatttccaagtctgcgtatagctatttgtagagtgaattatgaggtcaggaattttaatgtggatgaagcaaaggaggaaataaagagacgcccgcagaacctgagcctgaatgaaatgtttctggtggctaatacttatccggtaggttcacaagagtttatcgatgtgtttgaaacggctgtccggatgtatccgaaggatgagattgcgaatataaatgcagctactgctgctctttcgcgcaatgatcttatttctgccgaacgctgtctgaatatggtagattcgatgaaaaaattaccggagtatagcaacgcaatgggagtattaatgttactgaagggggaatatgaacatgcggaagaatatttaaatgtcgcatacgaatcgggactcaaagttgccggatataatttggaagaattaactagaaagaaggctaatgcctctgaatttagaattaaaaatagggataaataaattaattacaaacgcttttattaaattgtagaaacaatgaaaaagaagaatttttttatgttggcacttgctgctattgcatttgctgcttgtagtaatgaagacatcgttcctggtgggaaggataataatgatgtagtgaacttagatggtgatgcatgggttgcgttaagtgtccaatcaactaaaacgcgtgcgttgaatactccgaatcaggacaatggtacggctgatgagagtaatattactgctgtaaaagctgtattctttgatgggcatgttaacacaagtgtagtaacaaaaattgtaacgtttagtgatgaagatatcaataatttgcccaacagaacaagtgcatttaaggtaccttctacgtctaaagctgtattaatcatcgctaacccgcagaatctggcccggacaattaaggaaggtgataagtatgaagatgtaaatgagattgtaacactttcaacggaagcagaagttactacaggtgttgccaaatccggtgggtttgttatgacaaacgctaaaggtgatctggaaccttcggaaagtgatgggactgcgaagaacttagccttatacagtactgcaatagcagctactaactcgcctctgactattagaattgatcgtatatcggctaaagtacgtgtatacgtaaaagctgatagcggtgatgatgatgatcttagtgacaatgccactattgataaggttaatactaaatggtatttgaatgtaaccaataagaagttttttcctgcgtctaagagaattaagacagcaatgaattcatggactccatatgatcagtatagcattggttcatatagacaagacccgaattatgaagatagtaatattggtaagtgggtatcttctactaatcattcagattatgatttaaattatttttatgtaacgtccgctacaaattctatcacatggaatgatctggctactgctaaatactgcttggaaaatacacaagaggaaggctataatgtacatgcttatacaacacatgtattgttgaaggttttttatgctcctacaacaattaagaatcaagatgagtctaaggtgactttgcttaatggagaggactggttcaatatgaatggtgtattttatactccggcttctgttttaacgtatattgaagaagaattgactcgtaaatataaatctggtgaaccggccgaatatccaacgggaataacagacctttacaacgaatttatagaagcacttggcgaaggtgatgatactcttaatccggtaaatattcccgctgctaaggatgatgctaaaactccggagcagatggcttcagacattaaagatgagtttgcagcattagcaggaaaaatagccacaaaaagtgcaggtggaaagactctgaaaactgttgaatattactcaaaaggtatttgttattacaaaattatgattaaacatgatgatagtcccactataatgaataaattgggtgagtttggtgtagtccgtaattcggtatatgatattactgtaaataagattgataatcctggctatccttctattccggatccggacccgattacaccggatgaagaagaagaccgttatttgtccattaaaattgaggttaacccatggacttggtattcgcaagttgaacctctgtaattttatattcattgttttattgcgacttgaggtaaagaggggacgctctctttacctttaaaacaaagaataggaagaaaaatcgagagctatcaataatttcaaaatttatagcttgatagaaattagaagaatagaaatatgaacctaaaaagccttatatgccgtgttaccttggggattctcattgttagttcctggacaatggtttcttgcgatagctttaaagaagatttgccggaatgtcgcttgtctgtaaagttcaaatatgattataatatggaatttgctgatgctttccatacgcaagtcgataaagtggaactttatgtttttgataaagacgggaagtttttattcaaacaggcagaagaaggtggttcgctatcgacaggtaattatctgatggaggtagcattgccggtgggggagtatcagtttgtagcatgggcaggtgcacgtgattcatacgatattacttcgttaattcccgagacttctaccattacagatttgaaattgcagttgaagcgtgaggagtctcttattattgacaaagaattggaaacgctttggtatggtgagattatcaatgtaaattttacaggaacaattcatcagacagagactattaatcttataaaagatacaaaaagggtgcgttttattttccagagttatgcgaataactgggaattaaagatgaatgattatgattatgaaattcgtgagtctaacggatatttgggacatgataattccttactggatgatgatgtgttgagtttccgtccttatcatatgaatcagttgaattctttttctgcttcggtagacttgaacacaatgcggctgatgaaagatagaacaactcgtctggtgattacggaaaagtcgacgtcaaataaggtatttgatatcaacctgattgattatcttgctatgactaatatggaggataaaaagatcggaatgcaggaatattttgatcgccaaagtaattatcatattgttttctttctctctggttcatggcttgcaatgaaaattgtcattaatggttggactgtgtattcgcagacagaaggagatttctaatagaaagagttagacagagggagaattagaaggggccgggttattatcaacctaaccccttcgttatttataaagcttcaataacttcatgctgtttctgcatgaaaacgatgcgttgtgcttctccgctttcagaaattagagtggagtgacgttttaaagacagaatccagtcacgttgcatctgacagatatgcggactttgtgaatccattgaattgatagaatatacccgtagcagactgattcgataatttgctttttcgatataactataagtagcttcaaagtttatgttagacaaatagaaatatacctttcgtccattactaaactctcctttacttgacagatgttcgataagtgaaagcaattggtgaagttcttctttcagatgacgtacatcctccggtgttatgagattcagactggcaaaatacttgatttcattgacgaatgaatgaaaaatgttagtgtcccagataaaaaaagttttcgggcattgtttcacactttcactcaatcttttatgcgcctgttctattcgtttttctacacgcatatccgataaggaatggggagttttaatctgcccgtgctggtatagccaccgacaaaggcggaatttggataaatattcgtaagaagaataaagtgtgaaaggcaagaggttggaggctgtgtatatctctgtactactatcttctttcacatagtcaaatatctgttggtaacgattgagaatctcataataattctctatcgcattaggcgaatggaggagattcaaatcaaaagtaactttattggaatgatggctaccaacaacttggtcgatagaaattcctaatttggaagatatagtagctatttcttcgatagaaaaagaaacttcccctcttagtctacgatagacagcttcttttcccatgaacaagatatccgccaggacgctggcaaggttttgtccttgcggaactctttctttcataactgcaatcaattcattcaaaataccatttttcattgtttgttcttcgtttttaatatgaataatattcgtgatacatttaatgcaaaattaaagcttgtatttgaaagatttgtgtggaaaaacaggtataagacaggagtgaattttctgattaaatataacagataggggtgacggacatataatgaaaaaaagtagataagtattttatctactttcatttattgtaattatggattttacatctttttgttttacgaaaaaaatgaatttaaagagtatcaatgatttccctctgctgtttgaagaattggatacgttgcatttcaccgctttcagaaatcaaggtggagaatttctttaaagactgaatccattcctttaagctacagaagatttcattgtccattgtggtcagagaattaatggagtaaacgcgtatcaggcttagttggatgttattagtttctacataactgtacgttgcctcaaaattaatatgcgacacatagatacgaactgtgttaccattctctgttttacctttagtggcaagatcttccagttcgtttgtcaggaggaataattctttcttgatatcttctttagcttcatttgaaataagatgaatgctggaaaagtattggatatcgttgatgaggtgctgaaagatcatactgtcccagatataatcaatagaatggaaatgctttgtcatatccacatagtccttttggatattaatcaatttctgcggaagttccagttcctcaaaacttttacattggatatatttattctgatacatccacttgaataaacggaattttgccagaaggtcatgtttcaggtaaagcgtttgtggaatgatgttggaagaagttcccaaagaagaattcggatcgtcttccaatgtattaattagtctgacgtatttatataatatattatagtagctttcgaaagggtcatcgtaatctacaatattcatatcaaacatcgcattggatttgaaactgattcctataattttatccagagatatccctaactttctcgaaacgagagccgcttcttgtaaagtgaaaggaacctcaccacgtaaccttctatatacggcttctttgcctatatagagagtatccattaacatatctgccagttttcctttgagtggaagcttttctttcatcgcttctatcaggtttgtattcgggtcatttgttatcataacagtttgaataagttgttctttagtattataaacatttctcagtgatgagttgtttcggaaagtgaaactatttaattaatcttttttcaaaaatatccttctttaaaattgtatattttgagcaaatcggttacatttgtgtccataaacaaaacggagagacagtgtctctttagtaaacaatagaaaaatatataatgaaaagaatattggttagtggcggagccggattcattggctctcatctctgtacccggcttataaacgaaggtcatgacgtgatatgccttgataatttttttacaggatcaaaagataacatcatgcatttgatggataatcatcattttgaggtggtacgacacgatgtcacttacccttattctgctgaagtagatgagatttataatttggcttgtccggcatctcctatccattatcaacatgacccgattcagactgccaaaacatctgtaatgggagcaattaatatgttgggactggcaatgagattggatgctaaaatattgcaggcttctaccagtgaggtatatggagacccaattgttcacccgcaaccggaaagttattggggaaacgtgaatccggtaggatacagatcatgttatgatgaaggaaaacgctgtgcggaaactttgtttatggattatcatcgtcagaataatgtgcgtgtgaagattattcgtatattcaatacgtatggtccacggatgttgccgaatgacggacgagtcgtttctaatttcattttacaagcgctacataatgaagatattactatttatggagacgggaaacagacacgtagtttccaatatattgatgatttggttgaagggatgatacgaatgatgaatacggaagatgaatttacgggacctgtgaatcttggaaatccaaatgagtttcccgtattggaattggcagagagaataattcgtatgaccggttcttcttcgagaattgtatttaagcagttgccggatgatgatccgaaacaacgtcagccggatatcacactggcaaaagaaaaactcggctggcagcctactattgaattggaagacgggctgaagtatatgattgaatattttaaaactgtctgatgcataaaataagataattatgaatatggaaataaatccttctgaatataaagtccttattgtggacgatgtaatatcaaatgtccttttgttgaaggtacttttgactaatgagaaattcaatattgtaactgccggtaacggcacgcaagcattggaacaggtgaagaaggaaaaaccggatttggtgttgctggatgtaatgatgccggatatcagtggatttgaagtggctcaacagatgaaggcagatccggaaatgtctgaaattcctattatttttctgactgcgctgaatagtacggcggacatcgtaaaaggattccaagtaggaggtaatgattttatttcgaaacctttcaacaaggaagaattgataattcgtgtaacacatcagatttcgctagtggcggctaaacgaattattgttgcacaaacagaggaattacgtaagacaattatgggacgtgataaactctattctgtgattgcgcatgacctacgttcgccaatggggtctatcaaaatggtactgaatatgttgattctgaacctgccgagcgaaacaatcggcgaggagatgtatgagttgcttacaatggcgaatcaaactactgaagatgtattttcattacttgataatctgctgaaatggacgaaaagccagattggcaaattgaaggtggtttatcaggatatcaatatggtagaagttgtagagggggtaagtgagatctttacaatggtagccggcttgaagaatattaagattgtgcaggatgtacctgttgcagatgtagctgttcgtgctgatattgatatggttaaaacggtaatccgtaacctgattagtaatgctatcaagtttagcaatgagggggcggaagtggtggtatcgttggctgaggaagacggtatggcaatcgttagtgtgaaagatagcggatgcggcattgatgaagaaaatcagaggaagttgcttcatacggatacgcactttagtaccttcggtacaaataatgaagaaggttcaggactcggattgttgttgtgtaaggactttgttatcaagaatggtggtaaactctggtttacttcaaagaagggagagggatctacatttagtttctcaattccattactggataaatagaatataaaacggtaatttataaatcatgaacggtgaatgttttgtgcttgtatgcagcattcaccgttcatttttttattcaatcattatcatatttatgctcatcgtttgcagattgctttgaaatcgcagtaactacactttttaatatcttctgtttgagtgaaaggttcgttttcactgaaaatctcttctaataatgtttgtaatcgcttgcggaactcgtcttcgaaaaaggtgaagttattgaccggtatctttggctggcggggttctcccatttctataacaggtgagtaactatcggaagctgcccggtgaatatagagcagagcaggagccactttcaatgtttgttgccggcacataatggaggcatacaggaaagtttggaagatatagttcggacgtgtttccgaaggggtgaacaattgttcgatattagccggtgtcttgggggttcctccggttttatagtcaacaatccgcaatgtgctttctttggcatccatgcggtctatggttccgcccaagcgaactgtgaagggacctaggtcagtttgaatagttatcttttcggaaacagcttgttccatagcaaccatttcgaaaggggcatattggaggtcattgcgtaataattgtcgcagataggaggtgattactttggaattaatgagttgtacaccgttatattccggtttttcttccggtttaaccttgaaaaattcttctttgaaagcctgatcaacgtaaccttgtaatttaacatcgttacgtaataagcgttcaagatcctctttctgtatcatttgcccattggatgtcagttcagtataggctagttcggcagagcggtgaaagattgttccgaataacgcggagtcaatttccgcactcacttcttccggtgtttttaatccggctatatagcggaagtagaatctcaaacggcagtcgagatatgtattgagggctgaaggagagagaatgagggacttaggattggtaacgtcatagatatggtataatcgttctaatattttctgtgtttttggtatttctatttttggggtactttggggagattgtccggcctctaaatattcacgagtaatctcatgaggaccttctactaataattgtagcatgaaacgggactcctctccgcgattcaggccgtcggaagaggtattgtagagcaaggtgatattttctgcccgctgtatcaagcgatagaaatagtatgcgtagactgcatttttgtgctcaatagtcgtcatgccgaaggctttccgaaggttatagggaataaaagaagattctccaccggttttaggaagttgtccttcattgagcgaaagcattacaagattacggaagtcaaggttacgtgtttcaagtactcccataacttgcattccaatggcaggttctccgtggaaaggtatgttggaacttgtcagtactttactgattaatcttttcagtgtatggggctgtatatttaattctccactttcaatcaaactatataaacggttgattttcaaaaagctttgaaaaagagattcacgatatagttggttgaatatatcgttgtattctccttctttacggtatagggtagagatatctttgataagtccgataagataatcacatagctccttgataccgttacggggagtgaaaagattagctagaaactcatcttgtttcaattccgagggaagcggatagaaacggttggtttttgtaagttcccgttctattatatctgcttttgtcgataattggcgggtatatggatgttttagtatagctgatacggtttcgtaggtgaaacgaccggtatcaaaacggtagccattggtttgtagttccatagccgcattgataaaactataaaccggagtttgtgccaacgggaatcccattgtgatattgacattcttcacttcttccgggatagaatggagtacgggaagcaacaaggcttcattgcaaaggactacggcattttctttttcattatcggatgagaaagtagtacgtatccattcgggaaggaaacgtgcttgcgcattctcagtagaagcggagatgtaacgtatcttcttcggtttctttagggagtcaaagtagctggcaggcagttcgttcgggaaatctttcaggttgcggttaataaattctccggcctcatgttttttgatttgttgggtatagaagatgtcataatcccaatagaatattgctttatctgctttttgcagttttcggaagaattctttttctactttattcaacacattgaagccgacaaatatatatttgtcgtatttaagttgatctgtatcaagttgttcgataacattgcgataaagcattccttcataagcaatgcctaactcagttaagtttttccggtaatggtgatagattgtgcctaacttatcccaaagagatatgaatttctctttgagctccgtgcggcgctcaatggagaaattccggaagaattgttgaattgcttcttcctgttctttatctagaaattcgtagtcatccattagactttttaagtcttgcagattgctgaagagcttatctgcatccaccaaatttttgtctacatcatcaaagtcactgattaacagttctccccaaaaatagaagtcatctaatgtctcctgactttctgtttcttccttgaatactttgtagagttcacaaaccaatcgaatcggatcaccggttttctgtacagatagcttctgaaacagatcactgatactcatagcggcaggtgaccatatcggttgatcggattctcccgccagatattcattgaagaacaggttggcacgtttgttagggaagatgagtactgtgcgagagaggtcatttcctattttggcatataggtcatgagctactaattggagaaatgattgcatattgattaaatcgtttttctaattcatattattgtaatcggagttctgtcttatactttttctattttttcttcatctacataccacaggtatccggtaatattcttataacccattttcgtcaacagttgcatatatcctttcacttgtttattgtatttaggattttctttaccaaacttaaaatcaaccacaacaacctgcccgtctttcatcattacacggtccgggcgacgagtttgtaatattcctttttccttgtatataatggcacattcattaaacagggtccattctccggaataccaatcttgtatttcgggagatgaaaacgctttctgtacaacttcacgtactgtatcttctttttcctggtctctaataactccttcaaagattaatcgttcgatagccggatcaatatcatcggctgtttcaatggcagaaaacagagtatgcaacatacgtccgcgattgatgaaacggtcgtccgaatcttcttcttcgattccttggataaagtccgcagaacgattggattgccggaactcgatgtcgtgccgcatggactccatttgaatgggcaatttttctgctttttgggttaatttattagtggaggctttgaccttttctttttcggacggacagagttctccttgctcataacaatcttcttcccattcgattccttctttgagggcaaccataggaagagtatttgctaatagttcggacattgttcctttttgcccttttctgctccagattattagattttttccggcacgggtaaacgctacatagagcaggttcaggttatccacccaaagttggaggcgttcatgcagataatcgtttccatagatagattctgccatttgcgtggaataattaataggaagaatatctaaagcattgaatggcgcttcttgaggagcacaccataccagttgattattcgtttcattctctaatttccagtcacagaaaggaagaagcacggtatgaaattccaatccctttgatttatgtatggaaaaaatccggatcccttcgatttctccgctgggaattgttttgctacacaaagtttcgtcccaatagcgaatgaatccgtcgagttcagaagaattattttgcaaataatctgttactgcatcaaaaaaggcaaataaataagcatcttgttctttgatgcgattcatctcgaacaagctgaataattcttccaataactcgtagagaggcattaaccgaaactcttttattttatcaagaaatgccgtaggaagatagctttcggcgggaagaagcaagagggtattccaatccagtcctttctgtaagacctcattctgataggctatggcaagttgggcccgtgctatcttgttgttttcatccgagaggtaacgaagagcatccagcatcatgcagatagcaagggaagcgtcaagacggaaggcttcgtctgacactattttgtaatgcagctccttatcaaagtaatctgcgatgcggggaatacttttattctttcgtactaaaatagttatgtcgttcaggtggataccggaagcgagcagatgttcgacttcttctcccaggctgataagtgtctgttcggtatagtcatgttcttcgtccggttcgaggaaagaggctttgacataacctttttgggtgtttaagggagattcttgtacgacgtctgcatatgccttttgcagatcttgacaatctttgttgagctgttttttataaactccattcaaataatcagtagcggccgtaaatatatgattgttaaaccggatgatgttcgtttcacttctccggttggttgccagtgttttgacgcgaatcgggaagtggtcgatatggtcatttaacccgttgaggattccccagtcgccattacgccaacggtagattgactgtttgacatctcctacaatcaagctgtcggctccctgggataatccttcgagcaataacagtttgaaattaccccattgcatccggctggtatcctgaaactcgtcaatcataacattgcggatgttcgttcctatcttttcgaatacgaaagaggaatcaccgtcttttactaattggtggagcagggcattggtgtctgagagtaggaaccgattattttcccggtttaactcgcgtacttcttcgtcgatattggcgagaagttgtactttgttgagatgctgcaaagacagtcggcaactattcagtaacaggttattttttgatcgtaacttttctgcatcttccaaaatctgcataaggctggaattggctaaagcaataatgtctgcatagcgtggagacgtttttgtagcccagtttttggcatcttccagacacttttctactgtaacattgcgaacatcgttacctaaaataccgttgttgagcttacggaaataacttccgattcctcgtgaaccgtttttcagatcgtcagcagttaacgcatgtccgtctaattctccttcaaactgatcatagaatcccttcatttgttccaaaatctcagtctccagtgctttcaactgtttacggtattctttaatggtatccggattgcatagccgatgacggagtccttctcctttttctatatatccttcatcgaatatattacggccgaaattcttgacttcgtccgatacgttccaacgtttgtcgtctgcaatccgctcattgatataatccagcagccatgcgaggacaggagaggtagggcctaatttctcaatcatactgtctaccgcttcactaagcacttccgtattgttcagttcgatattcaggttagggcttaattccagttcgcgagccagattgcgcataacagactggaaaaaagaatctattgtttctacccgaaaccgactgtagtcgtgtaacatataaccaagggcaatgcttgctgcttcccgtatttcctgctctgtttttcccgtttcttctttgatacggttgagataggcttcggatcctttgtctcctgtctgaataccgtacagctgactaagaatacgttctttcatttctgctgtcgccttattagtgaaggttacggcaagaatctgacgataggctcgcgggtttagaattaatagtttgatatattccacggccagggtaaatgttttacctgaaccggcggaggctttatagactaagagttcactcattatttaatgattgggtgttatataagacaaaaataatgaaagtagtagaagaaacgaaataaaaacatgataaaaagatttttccttagtatatttgtgctgttgactatatcatcattagtagacagagtgataataaaataaaaaatagaggagaggcgttagtagttttcctcttttagttgtattatatataaatggattagattttttttcatctatatactatgatttatgcagcagaataaaacagtttctcaacagaaaactatcaacccggtttactgggtgcctaccgcttactttgcaatggggcttccctttattgctattaatctggtttctgtatttatgttcaaggatttaggaatttcagatacgcaaatagcattctggacttctcttattatgatgccttggacactgaaattcctgtggagtccttttcttgagatgtatcggacgaaaaagtttttcgtattagtgacagagttgttgagtggggtattatttgggatagtggctttttctttatttttcgattacttttttgctattagcatttctacaatggctgttattgcttttagtggggctacccatgacatagcttgtgacggtgtatatatggctgaactgaataaagaagaacaggcaaaatatattggagtgcaaggtgcattttataatgttgctaagttggtagctaacggaggattagttgctatggcgggagcactggcagaatactttggagcaatagaaggggcttctttagaagcaaataaaggagcatattcttatgcatggatgattatttttgctgtgattgcggcaataatggtattaataggtctctatcatataaggatgttgccgtctaatcagataccgtctacaacaaaaaagacgacctcagaagtagggcgggagttagtagcggtaattgctaatttctttactaaaaagcatattttttactatatctgctttattatattatatcgtttggcggaaggatttattatgaagatagctccacttttcttacgtgcttcaagagaagttggcggattgggattgtctttaaaagagataggtacgttaaatggagtttttggttcggcagcttttgtgctcggctctttgctggcaggtatctatgtctctaagttcgggttaaaacggacactttttacactttgttgtatttttaatcttccgtttgtggcctatacttttctggctgtaactcaaccaaccaatgtttatctgataggaacctgtattactatggaatattttggttatggttttggctttgtcggtttgacactgtttatgatgcaacagatagctccggggaaacatcaaatgtcgcattatgcatttgcatccggaattatgaacttgggagtaatgcttccgggcatggttagtggctatttcagtgatttattaggatatcggaatttcttcatctatgttttgattgctacaattccggcttttctgattacctattttataccattcacttatgatgattcaaaaaaataaataacataaaaatttaatgattatgagtaagattcaaatgccttgggaagaccgtccgtccggatgtacagacgttatgtggcgctattcacaaaatccggttataggacgttatcatattccctcatctaacagtattttcaacagtgcggtcgtaccttttaaggaggggtttgcaggggtattccgttgtgataataaagctgtgcagatgaatatctttacaggattcagcaaagacggtattcattgggatatcagccatgaacctataaaattcaaggccggtaatacagaaatgattgaatcggagtataaatatgaccctcgtgtcacatggattgaagaccgttattggataacttggtgcaacggttaccatggtcctacaatcggtatcgcttatacttttgattttgaagagttttttcaatgtgagaatgctttcttacctttcaatcgtaatggcgttctttttccgcaaaagataggcggcaaatatgcaatgttgagtcgtcctagtgataacggtcatactccgtttggtgatatatatatcagtttcagtccggatatgaaatattggggagagcatcgttgcgtaatgaaagtaactccattccctgaaagtgcatggcaatgcacaaagatcggtgcaggttctgttcctttcctgacagatgaaggctggttactcttttatcatggggttattactacttgtaatggtttccgctatgcgatgggggctgccatacttgataaaaatcatccggaaaaggtactttatcgtactcgcgaatacctgcttggccctgctgctccttatgaacttcaaggggatgtccctaatgtggtatttccttgtgcagctttacaggacggtgaacgtgtagccgtttattatggtgcggcagataccgttgtgggtatggctttcggatatattcaggagattattgattttactaaacggacaagtatcatttaataagatatgaaacgtattctattaacttacacattagctttcatccttcttcccgtttatgggggagagggaggaagctcccctgctgagaagaaaagtcttttgatagattatgttgatccttttgtcgggacaacaaattttggcactaccaatccgggagcaatttgcccgaacgggatgatgtctgtggttcctttcaatgtaatgggatcttcagaaaataaatacgataaagatgcccgctggtggtccacaccttatgagcataccaactgcttctttaccggatatgctcatgttaatttaagtggagtcggatgtcctgaattaggttctttgttgctgatgcctactaccggagagttgaatgtagactataaggagtatggaagtaagtataaggatgaacaggcttcacccggttattattccaactatctgacaaagtataatgtaaaaacagaggtttcggctactccacgtacaagtatcgcccgttttactttccctaaaggtaagagccatatactactaaatctgggagagggactgacaaatgaaagtggtgctatgcttcgccgtgtaagcgattgcgaagttgagggaatgaagctgcttggtacattctgttataatcctcaagctgtatttcctatttattttgtgatgcgggtaaagaaaacacctgtaacaacagggtattggaagaaacagagacctatgactggtgtagaggcagaatgggatccggaccagggaaaatataaactttatacccgctatggaaaagagatagcaggagatgatgttggtacttatttttcgttcgatacggaggaaggcgaacaggtagaagtgcaaatgggcgtttcgtttgtcagtatagagaatgcccggctgaatctggatcgtgaacaggagggtaggaactttgaacagattcatgcagaggctcgggcaaaatggaatgacgatttgtcgagaattactgtagaaggaggtactgatgctcagaagactgttttctatacggcactatatcatttgctgattcatccgaatatattacaggatgtcaacggagaatatccggcaatggagagtgataagattatgacgacaaagggagaccgctatacagtgttttctctctgggatacctatcgcaatgttcatcagttgctgacactggtctatccggaacgccaaatggaaatggtacgtactatgcttgatatgtatcgggaacatgggtggctgcccaaatgggaattgtatggaagagagacattgactatggaaggtgatccgagtattccggttatcgtagatacatggatgaaaggattacgtgattttgacgttgatttggcttatgaagcgatgtataagtcggctacattgccgggagcaaagaatctgatgcgtccggataatgatgattatatgtccaaaggctatgtaccgcttcgtgagcagtatgataactcggtatctcatgcattggaatattatattgcagattttgcgttgtctcgctttgcggaagctttgggaaagaaaaaggatgcggaaatgttttataaacgttctttaggttataagcattattatagcaaagagttcggtactttccgtccgattcttcctgacggcactttttacagtccgtttaatcccagacaaggggagaattttgaaccgaatcccggtttccatgaaggtagtgcatggaattattcattctatgtgccacatgatgtttatggacttgccaagttaatgggaggaaagaacccctttatcaaaaaactgcaaatggtttttgacgaaggtctttatgacccagccaatgaaccggatattgcctatgctcatttattctcttattttagaggagaggaatggcgcacgcagaaagaaacacaacggctgttggataagtactttacaacgaagccgaatggtattcccggtaatgatgatacagggacaatgtctgcatgggctatttttaatatgattggtttttatcccgattgtcccggattgccggaatatacattaacgactcctgtattcaataaagtgactattcgtttagatccgaaatggtataaggaaaaagaattagtgatagaaagcaatcgtactcaaccgggaactttatatattaacaaggtgttattgaacggaaagaaattcaatcaataccgtattacgcatgatgaactggttcatagtcaacgtatattatttgatttaaagtaacacacagtgtttcataggtatcgtttttgggttgacagggctgtcggacttttcagggttcggcagcccattttttattacatttatattgattgttgttcccgataaaaaagagtgatggtatgtgtcgggtatagtgtctctatatagctggaacagcgtcactatgggttcgttgtcgataattcccgggataaaagttcctaatccctggggtaaacagtggaatgctgcaaggcgaatagtaatttgcgataattatatgtttccaaccgacttttttctctggaatttgtttcctttgtagaaaatggatttattatgggaaaacagaaagtagcattagtcctttctatgggtggtgcgcgtggtattgcacatattggagtcatagaagaattattacgtcacaattatgaaataacttctattgccggaagttcaatgggagcaatggtgggagcgatgtatgcttcgggaaaactggaagaatgcaaagaatggctgtatagttgggataagcgcaagatgtgggaactggcagacctcacattaagtcgggacggactggtgaaaggagatcgcttcatcaaagagttaaaggagataatccccgatatgaacatcgaggacttgccgattccttatgttgccatggccaccaatattgtttgtgatcaggaggtgaggttcgatagtggcagcttacatgaggctatccgcgcatccatttccataccaatgcttttccgccctttgcgaaaagacggcatggtattgattgacggggggatcttgaatcccctcccgctcaatcatgtacatcgctccgaaggagatattttgatagcagtcgatgtgaatgcgccggttgattgcggaaagaaaaagaagatgagtccttataatctgttgacagaatcttcaagaatgatgatgcaacaaattactcgttatcagatagaacgctgtcagccggacatattaatacggatgtccggcaatgcttatgatatgctggagtttcatcatgcagagtccattgtagagacggggattgagattactcgaaatgcattagatcgcattggcgtgacatcccaagaaggatagacttattccacataaatcatctttttcgtcattcctccgtcaatggttatgttctctccgttgatgaagtcattgttttcctcgcaaagaaataagcacatacgggcaatgtcttccggtttgcccactcgccgggaagggtgttgtgaatggtcttccgggcggagctggttgtagtcatgtgtctgtatccaccccggtgcaatagagtttaccgtaatgtgccattcggataatgatgaggctaatgcatgggttaaagaatagataccaccttttgaggcggcataaccttcacttccgggctcgctcatcagataacgggtggaacagatattgataattcttccgtaaggattgggaaaggaaagggctttacgatgaatggcaagtaatcgtgaagtgataaatacaggacgcaggttgacagagagaatcttgtcgaaatcctctatacttgtttccgtgataggagaaaagttactaatgcctacattattaataataatatcaagatcgccccattccttcagaatttgcaggacacaattctctaacgactctttattgcttacatcaaccttgtggaatatgcttcctgtttcttttgcagtttgttgaccggatgcatcattcgtatcacagaaagcgaccaggcaatccgcttgagaaaatgcttctacgattgctttgcctattccttccgctccgcctgttacgaaaactcttcttttccgtctgtttgcatcggaaggtatcttgtcagcttgtcccgttctcacctgatgcgttgttccggttttctttttaccatacttctgtgcttgtttccaagctgcttttctggcttcatattgttcctgctgtctttctatataattatctgccataatttcttttttactggcaaatgtaaaatataaaaaggataaatgcaaagaatcgcccgctcctttttgtccaaacgagcgggtgattctattccatataccatggcccctaaacggccgtttcccaatggtaatgcttcggtccatacttgtgccgggcgatcgtaccagagtttatattcctgcacaggtggttacttttcttgtgcatgaatactacaggcaataaggcgtagaaataattaaaagttatcgggcataaaaacgaatttcaatatccggctgaaaagggcttgctatgcataggtgaaaatacgttggaagtgtaaatacaataatgtgtacttatctattcattataaacaaataactaaaatgtatagtttaattattggaccattattgttccgcattgatccggaaggttggcaaagttatattcgttcttttcttgtaaattgaaatatacttcttatatttgtcgttagaacatttaacgaaaaaaattatgaaaagtttaaaggttacatctatgttggcagtactgatgttcttgtttataacaggaatgcaggcacagaccgtaactcccagtaagaagtatattacaaaggagttgaataacgtaagcaattttagctcaatcaaggtgctaggcagtactgatgttgaatatcgacagagtagtggctctaaaacagagatctctatatatggttcggacaatttggtcgatttgctggaagtatctactgcgaatggagtgttgcaggtgaatatcaagaagggggttaagattcttagtggagaacgtcgtttgaaagtgattgcttcttctccttcattagatgaagtagatattaaaggttcggcagatgtatatctgaagggtactattaaaggtgttgatttgactctgaacataaccggttccggagatattgaagcggagaatctgcaatatactaatctttctgcttatataaaagggagtggagatatcgatgtgaaaaatgtgaagggcactactgtaaaaacgatagtcagcggttcgggagatgtgaatatcaaaggcactgcgaaatgggctgcattgactgtaaacggctctggtgacatcagtgctgataagttggcggctactgaagtgattgccactgtttcaggttccggcgatatctcttgttatgcttctaaacagttggatgcaaaagttagcggtagcggagatattgaatataaaggaaatccaactattctaaataaacaaggcaggaaagattctatttccagaaaataggaattctcgattataataggatgcgggtaaatatgcgtgatgtattgcatatttgcccgtttttgttttgtacctgtatgctttctattgattaatttcatagtaaaaatatatattattgtatgtaaatcggataaaaatgtagctttacatttacatttgcttatattagagtaataaatgaaaatgttaccattttagatagaaaacaccctttgtttttgtcagaaaccacctcgtaaaccggtatcgaaaagtttatacttgcatcggattttaatacgtcaaagaatcatcagacgtgttttactgaaagtgtaaaatattaattaaattaatctgatattagtatgaatgattgtttcctgaatttattatttagttttcagcttttacttcctttaaaggagggagcagattttgtgggcagtaaacagactattgatgtaattttgtctgatttgtctctgcttggatatgtaattcccgtagggggacttggtattggactatttatttgcctacttgcctatcttgcggcagagtataatgtccggtttcaatctcatgaaaaatataagattgcaatgaatatgcttcattcgatacatacacccttgacattattacgaaatcagttggaagatattaaaactgctagtctgtctgaaccggtttctctgaaaatagaggaagtcttgaaatatgctgaacgtataatagactgtaatcagaatgttatgacgcttgataagattgaaggtagtattaagcctaagacagctactgtcgattttgaactttccacttatatcacttccattgttaatcaatgtcggccatacgcaaacatccgtcaagtgaaattgaaggtcaacgaatgttcggattgcgtcagttgcaggataaatgagaacataatgacagccgcacttcagtatcttttatacaagataatcttgataacaaattcgggttgttgcatatcaattagcgtaacgcatacaatggatgcatgggaattacatatcagcaataataccgtaacggagaataaagctgaaagtttattttcctttatttccgctctgtttcctgtatatggatatagtggtttgaggactgtcagaaaaatcattcgtttgcatggagggaaaatgattggctacggacacggcaaattcgccactttcaggattgttatcccgacggactgtcattgccagaatcaagaatgtcccgttataaaatcctctcgaattcataaggatgaaaaacaagatttgaaagcaaaggatgctcctcatatcttattagtaatgaaggataaaccgttcagtgattatttgagaaagtctttgtcgagatactatcagatttccattcttgaagatcctgatttgataatacatactatcatccggcaaattcctgacacaatcattattgatgataatgtaaacggcataagtggtgattcgctctgttttcaagttaaagcagataaaacaatgggagagataccagtcgttctgctgataaggtcttttgataatgaaagctatctttctcatttaggatgtggagcagatcggttgaaattgcgtacagagagtatctgtaagttcagggcggatattcgcatgcttattgagaaccgtatagcgttgcgtgaacgaataaaaaactttttatctgatgccattttccctttggtgcctatgaggcaggaaatggaaaacacagatttgttatttatggataaagtcaatgaaatattggaaaagaatctctcaacggagaaatataggattgataaactttgtgttgatatagggatgagtcgtactgctttttacagtaagataaaggatattataggtatgtcaccggaagattacatctattcattcaaaatggataaagcacttaaattgttggcttcccaacaatttaatatttcggaaatagcaggtatgttgggatattgtgatgtccaatattttaggaagaaatttaaggatttctatcatgtatgccctacggattatataaagagtattattggctaaaaatctattctccggaaatttctcacggtttccgtaattttgagattgcaacacgtggataataaaacgaaggaagtaaaagcaacggaaggcaagggatatctgacaatcaagagccgccgccaacccaaagcgaatataggaaccgtagagaaagtcttagaaggtatctggcgtctttgaattgactcttccgaagaaagaacggttacctatcgcttgtaatatatttgttaattagttagtgaatttagtccttgattagctatagaatctccaaacaattcctatttttgcttcaagaagtatagtctgataaaaaaagagagaagtgatagtaaaaatgaaatagtataatcatcagaaataaataaggtatatgaatagaaaagttgatttatccatatcttgttatggagaagtaaaagatgggagatatgatattgtagcgttaccgtggggggctaccgaacctcataatctgcatttgccctatatgacggattgtatcctttctcatgatgtagcggtttctgccgctttgatagccaaacagaaatatggggtaaattgtatggtcatgccacctatcggcatggggtcgcaaaatccgggacaacgggaacttccgttttgtatccatacgcgttatgaaactcagaaagcaatactgacggatattgtttcttccctttatgttcaaggtatccggaaattagtaattatcaacgggcatggtggcaatacttttaaaagtatgattcgtgatttatcggtagactatcctgactttctgattgcatcaagtgaatggtataccgtattaaaggttaaggactattttgaaaatccgggtgaccatgcagatgaagtcgagacatctgtaatgatgcactatcatcccgaactggtcaatcttgaagaagcaggaagtggagaatataaaacctttgccgtgcagtctttgaatgaaaaagtagcatggattcccagaaactggggaaaagtatcgaaagataccggggtaggtgatccgcgtggagcctctgccgaaaaaggtaaaaagttcgcagaagcagtcgcagagaaatatgcaaggctctttgacgaattggtgaaccagaaactttactgaagaataaaatacgaataggtgaacaatagtgatattatctctattgttgagaggcactaaatgagtaataagtgaaaaagaaaattagttgtaaaggtcgtttattgtcttcagtgtatagatatatttgtgtatgtctcattgctgtcttttctactcttaaacagttttctttttcttatacaagatgctaataaactcattttgtgtttttaataaataatggaacagtttattataaacgggtctcacgtttataataaatgatattcagggttacttagtaaatggaactgaatatattaaacaaaacggggcaaaatctctacagattttgtcccgtttctattcttccggacatatatctatgccttcaaagtctatctttatgtctttatttttgtatgtctcattcttgtcccagttggttctttcggacaaatatacaaaataaaaagagcaaagtcaatagtttctatgttttcctttatttcttttgctttaccaatataattgccggattgtcttcttcatccaccttcatccgtcacggttggtgtgttaatcgttttaaaaggaatacaaatcttccgggtaatgctttcatcctgttttgatatgatataacacgtgtttgcgtaatggatggtcagcaggaacaagcggatggtcgaactcttttattcgtgtcatacctatcttctgcattacacgttctgaacggagattcggcagggaagtaaatgaatacagttctgtaatgtccggttgtttacgagtatattccagacaagctgttgctgcttcaggggcatagccatgtccccaatactcatgtgccagccgccagccgatttctatacccggtgcaaaatctacatcgaatgttatctgatgcagcccggtatagcccataaaagcatggtcttctttgcgttctacggcatacaaaccgaagccgcaggtttgaaattccttttggatacgatgataaaaattgagtgattcttccggagttaatggttggagaaagtactccatgacgtgagggtcagcgttcatgagggcaaaaagaggaatgtcttcctctttccaatcgcgaaggatcaatcgggatgtttcgatataagtttgcataaaattaaaaatagtaattcgcaaatatatgaaataaataaaaaaggtgctgacacctgacatgatatttaattttaaaagtcatacaaggaggtgtgtcaaaatggcacacccttttttcggacacaacttttgtgattagggaaaatagttgattgataacgagttagtaaatgacacaagtacggatttatccgtataaacattatttcgctaaggaaactactcttttcatgtaggtttctatgtaggttaattaataccaattgattcctactaatgcgaattaataataagtcattaactaactcgttatcagtctatgtacacgattaacatcaggggtaagcagaacccgaaagacaccaagatggtcaagctggagataattttcttcaagaccggttacgcccgtgtgccgaaggttataaacatcacagggctattaaaagactgggatgtcaagtctcagagtttccgtgtagggagtgcggaggccactaccaagaacaaactgcttttcgatttgcgaaccaaatatctgcatgtcgccgatacctgggagatggaaggcaggaactggtcgcccgtccagctatcacattgcttcgatgaaatcaaggcggccaaacccgaggtcaaagtaaagagtgtccagcagatgatcgattatcttgaagagacattcaaaaacaagaaacgcatcaagaacggtcagattgtcgacagcacgaccaatgctaaacggtatgtctatctcaagcgtgaactgcaggcgtttacaaaggaaaaatatgaaaaagccttttcctcttatttctttacggatattacagaagagtttcttcttgactttgcgttttggcttaaagaaagaggtatcagaaatggcaacaaggccggacttacacacaaactaaggttgctccgtgccgtatgcaggcaggcagaaaagaaagagatgtacggggtgaatatggataacttcctctgtctcggtgatgatattaattggccggaaaccacttcaagagcagttccggaaacagtcatagctaaaatcgcaaatgttgaccgtaccttgtttacgaaaaaagagcagttgcatcttgatttgttcctgttcagctactataccggaggtatggcgaatgtcgatgtatgtaacctgacatgggatttggtccaggaagaccgcatcgtctatgaacgtatcaagtttcccaaaacagccaaaccggaattactcagtaaagcaaaagccatcatgaataaataccgtgggcaaagttatggaaattatgtatttcctgtttttactcataaacacacgaccacttccaagaagactacacgtgtcaagcaaatttccacacgcctttcacaaaccttgacgaaagcatgcaagatgttgcgcattaaagaaaacatcacatggtattccgcccgtggctctttcatatcgaagatggtagatgccggtaataatccgtatgtggttgcagagatggctggtaacagcccattgaccatctataagcattactacaagaatacaaagcgggaagaaatcaagcggcagatggaagaaatgttctgaccagacatatccataaagttgtaaacaccttgacaatttctctgatggataaatcatacggtataatggctgttaaaagtcattgattaccaatgtgatatttattatattgacagaatcgctcttattcttgattattttcactacctttgtagtcaataacttaaataatatttatatgaaagagttggtttcaaagatacaggaagtatatgctacattctccacggatgcggcacttcagattgaaaaaggcaacaaggccgcaggtacccgtgcccgcaagacttcgttggaattggaaaaactgatgaaagagtttcgtaaggtttccttggaagaatccaagaaatagcctttacacgtccggtcgttatcacataatgccggttcttctgcagatgcggcataaaaaccatattggcagaacgacataataaaatacggaaagcgttagcttttgtcatgcaccgaaatctggtaaatttcacttatccgcaggacaaacagttttcgcctatgcttttgcgtgggcttaacttgtttgcggataggtttaccagaacctcggtgctacgggttatgtcccacgctttttggtcttggtacattgaatgcttgacgggactcaagccaaatacggagatattatgaacgacatgaatctgatggatgaacttttgaaaattcctgctgatgcaactgccgccaccgtacaaggcatagaaatgcttcttatcgatgaaaacaaggcgggggctttattggagtcggatcctaatgacaacaccatccacgaatgccttttaagcaacggccgtttcctgttccaatcggacaatgccaacctcgttgccctgtataaagtaacaggatcatctgaataacgctcctgttgcatataatcaccttatttgtctgatttcatccttcctgcaaaggcttttgacggcttgaatgccgggatattgtgggcaggcactatcaccgtggtattcctgcttatgttgcgtgctgtcttttccgcacggtgcttgatgatgaaactgccgaagccgcgaagataaacctcctcgccgtttatcatggaagactttacgctatccatgaatccttcgacaacttgtaacacgacctgcttctccagaccggtctgcgttgctatttccctgacgatatccgcttttgtcatattaactcttgattaaatactgtcaatccgttcacaaagatacatcatttcctgaaatatcctccttttacaaacacatataataaacattagccggcgtccgtctctactctttcgatacaaatagtatcgaagtatgaagctgacactcaaccgcaaattcaaaggtcagacctataccataggtgacctgtccatcgacggcaaatttttctgtaataccatcgaagatgccgtgagggaacttccggcaacctgtccggatactcctcgcggccgttcctgtacctgcaaggaaaaggtctatgccaagactgccattcctgccgggacttataaagtcactcttcagtacagtcccaggtacaagaagaaaatgccatatctgcatgatgtgccgcatttcctcggcatcctgatccattccggcaataccgaagtcgattccgccggctgtatcatcgtgggaaagaatacggtcaagggaaaagttttggaatcccgtactacattccaaaaactgtatgctatactcgagtccgaaagggacataaccattcagattgtataaatctaatggcggtcaacaggctcaaaccacccagaaacctgcgcatcgagttcaaaccgtccccacggcagtatgaactctggaaactgttgcaaccgaactattgtccccattgtggcggggagatcgagcaaatccttatcggctatgaccagcaaggcaaccctcagtacaggccccaatgcaggcattgcaagtcgcagaacctgccgcagctgatactgggaggcggagcggccggcggcggaaaatcgtatatcggcagcgtttggctggtgtcttcatgtatccggttcgagaatatccgtgcggtggtggcccgtaagacactcaagtcgttgaaggaatcgacatggaataccatcaagtcgattctgaaggattggggactgaaagaggatacaaactacaagataaacaacctcgaaggcacgctcacattctggaatgactcggtcatcatcatgaaggagatggcggatatccccagcgaccccaacttcgagcgtttcggctcttcggaatacaccatcgccatggtggacgaggtgtcggaaatctcggaacgggccgtcgaagtgctgttctcccgtctccgctggagaacccatgagacattcaagactccgagaatgctgctcaccaccaatccgacgattaactgggtgcgttcccgcttcgtgcaggacgaaaacggagacaaggtcatctgccgcgagggtgaagcgtatatacctttttccgtgtttgacaacccgaatatcgctttccgtcaggtgtacgaggcggccctgaacaagatccgggatcaggcgacaaaggaacgcctgctctatggcaactgggatttcgtggaagccaacgatatggcgatttataacagtttcgacggctcccggcatctcgttaccggactgaaagaaaaagcatacgatccgaccaagccgctcatcacggtgtgggacttcaatgttgccccccaaatgtcggtgctctccgcacaaatagactatgaaaacaggaaggtctatatactggaagagatactcggcaagccggaggaaaaggagaacaacacacctgcgttggcacggaaagtacgcttaaaactttaccgggacaagcatatcggcggagtggatgtgaccggtgacccttccgggttacaacgctccaccaccaacgaggacggcatcaacaactataccatcatcacggacactttcggcagaggaatcctgcgaccgaaggtaaagctattacgcaagcagcctccgcaggctacacggtgcgagttcgtcaacgaggtattcgggggctatgaaggctgggagatacaaatcgatatcaaatgtcgcaaacttacccaggatctgatttaccagcttcgtaacgaggacggtaccaagagcaaacagaagaccaccgacccgaaaaccggtgtcaaatatgaacggtacgggcacttgtccgactgccttgactacctgctctgttactacctgcgtgacagctggtacaagttcaagagcggaggcgacgggaacgggtatgtggtatccacatcggtaattcaggaaggattttcatactaataacggaacaaggatatgtacagacggtttctcaataatgacgactatcttgggataattactccggaagccctggcacaactcacgcggggcaatgatgcacgattcatccaggcggaagaatcgacggagatgagtatcgtggaatatttgtcggagaactacgagattgaaaaggaacttgcaaaaggaaaatatatcgccgaatacgaccgtcggattacctatcccgtgggtgtgcatgtctatttcgagggacaaatccatgaggtgatacgctccgtcagcggctatcgcaagccggcaacggttgtctattgggaagagagttctgatatccgtgtcgatgcgggacaagttgtaaattattcccagttcaacacctattatccgggagataaagtgaattataacggcattgtttatacttgtcttaatgaaaacgggtacaagttcgatgatgtccgtatcccgttggtcggcggttggatcgaggcggaagcctcgttatggcagcctgtcgagtatcctctgtgggcagtcgtcgagtatgaaggagcattctatactttgatgacgcttgaaggtttcgattacaatcttgacccgatggtttccgactgctggggagccatagccgattacgattcatcatacaatgcctatgagttgtcggaacacgaatatgtcgtttatgacggacgggtattttacccggaaacggatgtgaacgcggacacaccgcaagtcgggcagaacctctcgttgcatgacccccgcaactacaatctcaagaagcacatggtccggctggccatctacgaactcacgaaactcattgctccgaataatgtcagtgttgtccgcatgcgcgattacgaggatagcatgaaatggctcaatgatgccgccaaactacggcttaatccgcagattccccgcaaagtcgatgactcgaagaaacctgtcaccgactggcaactggctactttccagacggattatgatccgtataagaatccgtggatggtgtaaatagaaaaagtattaggtatcagagaaataattgttacattttttcaactgactaaataacagaagaatgtcgatgccttataccttacgagcaactaatcaaatctagcatctcgttacttatctaaattttttaattagtaatatctggtaaatgccggaattccggaatgagggatagaaaagtgaaagaactctttcgtacaaaaaaacagattttcgggcattgaaagaataattgataatcagttatttgtgctgttttttgaccaaaaacttgttttttggacagagcaaaaattgtcttctcaattaaaagatgggaaactcgcagtctttatatagcgagtatttcttcctacaccctctttctgtataatccccatctcttccatttttgagataaacactcgaacctgtctgtcagaaccttgatattatctgattacagaatcagcagtctatcaacttttctatccattcattgaagtgactgcaccgggcacgaagttcatccatgccgacacttttggtaacatctttgccggtagccggcttattgtagttgtaatgctgttttttgtctccttctatcgccttgataatacgtttgctcggagccgtttccggactattgtttatcagctcggggttgctggttttctccaggtcttttttcagctgttcgcagcgtttctcacaaccggggtaacgctttgccagatagtcaataccgcaaaagagcagagcttcaaattcatgcagctgaatatagggaatgaaacgactatcgttgattgcttcagcaaacgccgtttccaatgctgcgacacgggcgtaaggctcaccgattgctttggctgcttcataaccgggaaaatcatccggcaatgcgtagaggtcgaacatcgttgtgaaaacatgacgttcgtattcgccgtccatcttcattttccgcaacagttctaggtctgtcaccgcctgagcatagctcagcattccaccacgggcattctttttcttgttagtggtaatcaggatgctttttacacctgccacaccttgcgcttgcaggtagggacgcaacacttcctccacaaatccctgttccgtctgtccctcacaaaggacatgaataatcttcgctttcatacgggacgtcctcctatgatgtttttgtcccaaagttcgctcaccgtatagttctgaagccaaagatgatattctttggcgtcaaggtgagtgacagaggttgcctgcgtttccttgttcatttccaccacagagatatcgccgatgtcgaaatgatcgaccaaatccttgctctgcgtggcaataatgacctgtgcgtgtatggacgcatccttaatcatttctgccagctggctgatggcatagggatgcaagccaagttccggttcatccaaaatgatgacgttgggcattgtctgggcaggctgcagaagcaaggcggccagggcaatgaaacggatagatccgtcggagaactggtaggcattgaaacgatagtccgtggcagaattatctatccaccggagagaaatgataccacccacgggctccagatagaagtcctggaactggggaactacgtcacggacatagtcaacaatccggttgtaggcatccttgtagttctcccgcaggaacagcaggaaagaaggcagattgtttccgtgcgactggaggtaattggccgtctcgacgggacaagcctgacgtagcggcccctctgtcgatgaatcgtgaaactgatataccttgcagtaagaaagcatctggaaaatagttttggcaaccggatcctcacactctgcgagagcggactccttgaaattcggttccagtgctatctcatagggctttttctcccccttgcgatgccatgtaatccgctcttccgtgataatcagcctgtcgggagtggcattggccaatgaaaagccataaacatccatggaattgctgtcggcaaacttcagttctccggacatgaccggtgtccgtttaatgccgtaatgcagcaaggcatgagacgtgcccgatatttccacatatctcccgaatgacttgctcatcatgtagctcagcatccggaaaaaactgatgatattgctcttgcctgcaccgttggcacccaacaagatgctgacatcacccagcttcaaggtcacaggtctgtcataggctatggatttatatcctctgatcgtgacttcttgtaatttagtcctttggtatgtctttgccattatcgtcatattattgattgaattacaaaaataaccataaatcccaatacgaacgaaggaatgctcaaaaaactatagagttaatttgtccggagtctgaaggcataaataagaaatctgtttttctttttagctaggtcggattttcagttctgctatgtgtttcttcttctccaagccctttgtggtaaatccttcacatcgaaatgggaaaaagacgtgcagaacaagcggaacactcggtaaatgccgggattcctgaatgagggataaaaagtgaaacgcctgccaatgataacaaaaccagcaggcgtcatttattatattttgtcattttacgaatgtgacatctccttccacaacttcccagtcgtcgatttcagctcctattcccggtgtgcgaagcccgtccgtaccgagtataagcgagatttgacattcctgtcccgctttgaaattcggaatggacaggtaatcatagaccatttcattcaagtgaacttggatgaaaggctctaccgggctgtagtctaacggcaaggtggcaatgtaatgtccgtcgccggtatggtcttccgcagccacagacaagaagttaccgttgccgtccatacaattgagccaaatgtctgcctctgttatgctgccgatgtctttgtccgcctgcaatacgacattcaccttcggtactaacatatttcttctggtgaatgtgtcaagaaaatacaaaagttacaaccgaacattaagtgtttgcgttatacgcatacacgcttttccgtcaccgtaaggattaatggctttactcatttgctcataagcagatgcatcatccaataaaatcgatacctcggagacaattttgttataatcggttcctaccaattttaccgttcctgcatccaacgcctccggacgttcggtggtgtcacgcatcaccagtaccggtttgcctaaccccggagcctcttcctgaataccaccgctgtcggtaaggacaagggtcactttttccatcaggaacacgaaactcagatattccaatggttcgataaagaacatatttcccaaactattcaaattctccccgaatacttcatggataggtttgcggacattggggttcaagtgcatcggatagacaaagtccacatatggatattttgccgtcagatccttaatggctgtgcacatgctgatgaatccgtctccgaaattttcacgtcggtgtccggttatcaaaacgagtttcttgccatcagcaagccgtgaggtatcgtaacccgctttttccagcaccccggcaagttcttgttgtagagctccgtcagtctttattttatcaacaacgatatgaagggcatcgatgaccgtattccctgttacggttatcttgtcctcctgcacaccttccgtcaacagatttttcttgcttaaagcggtcggagaaaagtgataggtggcaatgcgccctgttatttgtctgttcatctcctccggccaagggctgtatatgttgtgggtacgcaggcccgcttctacatgacctacagggatctgctgatagaaagctgcgagtgcggcggcagtagaagtggttgtgtcaccgtgcaccaataccacatcaggtttcgccttgttcaacacatcacgcatcccggtcagcacacgggcggttacatcatacagatcttgcccctgcttcatgatgttcaagtcataattcggcttgatatcgaatatctgcaacacctgatcgagcatttcacgatgctgccccgtcacgcagacgattgtttcaaagtctgctgattttttttggaactccttcaccaacggagccatcttaatggcctccggacgagtcccgaagaccagcattaccttcttcattgttctataattttttagttatcagccaccaggcatactttatcaagtgaatttgccgttttattcttttcggttctttgagcaaccgataggcaaattcaagattgtggttcacccaccatttaggagccctttccacatggccagtatatacatcgaagctgccgcctaatccttgaaagatggctttgtgtctatgctgtatttcttccatcagtaattcctgtttaggagaccccatagccacaaataccacatcaggtcttttttcggttatgtcttttataagtctttcccgttcctcgtttgccttgatatatccatcccgataaccgataatgtgaatccctgcatattctttacgcagtttagacacagtttcttctatgatttgaggtttaccacctatcaaataaaaagtcttttctctataaaattgagctacaattttgagccacaactcacaaccgggaattttacacgcattttcaaaacctttttgtttgagagccatttgtgcgccggctccatcgcaataccctatgttccgattgataattcctcgtgtctgatctgtagcatgtaaaattttctcagcatttatggctactaatatgcccttattatcgtttacaaaagacaacaaagactgttcggaatcgaacggatatatttcgactccgtttaaagaaactttattcatttatgttggaaattttatattgcgagtaaataatgcgacattgcattaaacataaatgcattactccatcgcatatacgagattttagaactgatgccaggttttaattggtagtagaaatacccctttttatcttgcatatttcggattgtccattgcaatacttttttggcaagttcctcatattttttcatcttatgtaggcgggtcaatgttatcaatagctgccctggacaatggatgtcaataggatacattcggttatcataatatttaggagttccgtccgcttcgaaaaaatgattgacatagtagtcgaaacctttttcgatgtaaccattgaaagcatgatcctctgtcaactcttgataagcgatcagcgcatctaaattatatcctgtatgaaagctgtctacccaattctgtacggggagcattccatatacccaagccccgtcttcccgttgcccggaacaacaggctttaatggatagctccgctagtcttttgtattcctcctgttgtgtataataaaaacaataactcaacaatcgagaaccgagcagcgaagcattgaacacagtgtcattaccctctaacggactataagaaaagagaaagccaccattatacggcgtgcgatgcaaatcttttattacaaaatccgctgcacttaatgcaatctccaaatagtgtttgttcctagttatttcatatgcctgcatcagtgccgtggcacagaaatttgtagcaactactgtgggcgtgaatttgggaaaaagaaacagacggcgtgcctgccaatcgaagttatacccccagcaagcaccgctgtagcctttagattgtaaggatataagcaactctgccaattcttcaatccgagcctttatcatctccaacgttcccattttttcggataattgcggatgattttccacaactttatacagattgcaatatccggacaagaacagcccgataccttttgcgttatactctttcggaacgaaagccatccgtctcatattgaaagggcaacgcttgaaaccttgtatgaccatcaatctgcacaatacagactttttcagcagcggaattgcctgaaaaattttagagttgagaccatcatacggatcccaacccttgaaatgttcagtctcacaataaatttttagcttataaaaagcatctgcaatatcattcattggtgttattcattttgtcaagaatggcatacggccatctttatactttgggtttgtctcaatcgcataatcaagattctttctccagccaataatctttgccggacatcctgctacaatagcacctttgggaacacttcggttgacaaatgaatttccagcgattaccacatcatcttctattacaacagggccagcaataataacattaggtcccacccaaacattattctttagacaaggaacttctttatatggaaactgccgtacagtagaaaatcgcaatcctaatacgcaattttctccgatttctgttcccggtattaagacagtgctaatccctttgcacacacagtatgacccttttcctatttttgaatcagcggttatttttgaattgaaaatgagaaaaatcaatagttgtacgattttgggcaaaaccggaatatggcgttcaaatagccaacgttctaccctatagaatgatataatgtccatatgaattaatcctaccgttttcttataaattttgcgggatttcctgcccaaacttcattggctggtatatctttggtcacaacagaacctgctccaattatagctcgctctccaattgttacaggttttaccaccaaagtattcattccgagataggcgcctttgcagatatgaaccttccccctgtcgtaacttccagtattaggattcatgaaatgtgttactattttcacccccgatgtcaaacgaacaccttcttcgataaaaatatcttgtggataatttgtgtcaaatatgacgccctcaccgataaacgttcttttggggctgattatctgcactccaccccatttgcaaactaatggtctccatgcccttgatttcatgggtagatgttggaggtgtaaaaatattagcttcttgattctcagaatattcatagctcaatatatttctttagtgtattttcaaattttcggacaacaacggatgcaacaaaatgggttttcgcatattcggaattatatattgatacactcctcattttagcaggattctcgatatatggtttcattgcttctgcaaaaactgccggatctaacgaacttgatatatatcccatctttccattttcaaagaaatctattaggccacccacttttctggtaaaaatagggagtccgaaaatcattgcttccaaaaccacagttggcataccttccgtataacttagaaacaaatacatatcggcgttaatgtattcctttttaaaatcttccccacgtaactctccagtaaaacggacatcctttattttcttattctcaacatattgtttcaacataggaagttctgagccatcaccgacaaaggtcaatgtcagatccttgtattgtgacttaagtattgaaaatgtatcgactgtttcatatacacccttggccttttctattcgcccgctatacataatgttttcggcttttccttgtctcatcgaaaggtcaaaacctgaaataaaataatcgggtacttttgtcgaagttagatgtatatcagattttatccccctccttatcaattcattcttgaaatcttgggataacacaaaaatacacaaggccttattcaaattggcacttatccatttccaatctgcatttttagcatactcgaaattgaaaccatgaataaatacggatgttttctttctgaaaaatcggcaaatgtttaaatatataaaatctcgttttaaggctttatctccaagcgatgggttaagtagtactatatcaggtttaaagcaaatcaatcggattataaaacggataattaaaaatggataaaatatattacgccaaggcttacgaccgaaataaaaatattcaatattttctttccaatactctttaatccctaaataataattagttactcctccatatccggatttagtgggaacagttattaataccctcattgttagtgtttcaattgatatgattaaaataattaagaacattgaacatcaacggttaatctattttcgttttctgatgttatgcctttttggttgttcgtattggtagctatccatagaccatacatcagcacgatgagaaattcagattacaaaatttttcatcatgaacatagattactaaaccataagtttagttggaacaacatgtgcctctgttcaactaatggtgtaacaatgaaatacaataccggtataattgtaaccatagttattagtagctgggacttaaaactcaatttggattgaatatccataacccacatatatgtaaaaacatataagaatagcacggcaagtttgaagaatctatcataaaaagtcaaactgacatatccgaaattggcaaaagacaataggagaatacagaacccccagaatttgacattctgctcccaaaattctttccctatttttttatatagtatatagatcacagccaagacaccgaaaacggcaattgtttcacgaagcaaatagaactgattaccatactcgcgtatttcctctgcatactttccaacagactgtatgatattttgattcctaacgctctctttgacgtagttttcaaatatgccaaattgtgcgatattagtgacaaacgcgattttcgcaaagcgaacgatgaatgatacgataagaattaaatagtacactttaaacctatatcgcaagagtaggtttaatacagccgcgacacataaggcgagtagtgaatagtgaaaacaaatacataacgcagataaccaaaggtacttaacggctcctgaattaaggtatctcaaatagaagccagtaaaaacaaatgctccgctccaaaagcgaaaaccgagaaaccaatagtattctacagtaaaaatcactcccaggaagagtagccatgcaggaattgacattttctgcatatataatggctggagtggttttacgactccaaatataaatagagaagtatataccacacacgcacaagcagagaaaaaattccggttatcagcaattaaaccaatgaaatatttaaataatacaggatatatttctttgccatattttgatgttccagagtccatccattgctcaaccaatgatttgtcggcaatacgatgaaaatgctcataatgaaccaacaaatccatttgtggctcataaaaccaaccaaaatagaaagaaaagatcactactgtcccgtaaaagtggataattagttctttgaaattattgaaatatagtcaattacgcggttttttaaaatgaaacggacttgattttgcaactttgcagtctaatacaaatggctgctatgttccaagacaaatacgtattctctcaattaaccgcttttctgaacaggactcagttcaacaactatgttcgcaagtatgatggcaacagatatgtgaaacatttcacttgctggaatcagatgctcgcgatgatgtttggacaactgagtaaccgtgaaagcctgcgagacttaatcgttgctttcgaggcgcatagggccaagcaatatcatcttggtttaggtcgtgaaccgatagccaaaacaactcttgcgacagccaaccagaaccgtgattacagaatcttcgaagactttgcattctatatgatgaaggaagcctgcgagaagcggacgaccaacatccttgacatttccggaaagaaatatgcgtttgattcaacaacgattccgttgtgtcttgcaacattcccatgggcaaagttccgaagcaagaaaggaggggtgaaagctcatgtcttatacgacattgaagcacaagttcctgctttctataccgtaaccactgcttcaaagcatgattccacagcaatgtcttcaatccattatgaaccaaatgcttattatatattcgacagggcttatgactcctttaaagaactctataggatacatcttacagactctttctttgttgtcagagccaagacaaacttaaagtataagacagtcaaatggaagcgaagaatgccaaagaacataatgacagatgcggaagtgaaactgaccggatatctctccgagaaaaaatatcctgagtcattcagactcgtccgatattacgacgaagaggatgaccgtgagttcactttcttgacgaatgcaaaacaactttctgcactggatgtcgccaatctttataagaaaagatggttaatcgagctgttcttcaaatggctcaagcagcatctcaagataaagaaattctggggcacaacagagaacgctgttcgcatacaaatcagtgtggctattatcacgtactgtcttgtggctattgtccaacatgatatgaagttgaaacgttcaacctatgaagttttgcaaattctcagcatatcattgactgacaaaacccacttgcgtgacctgttcgacaagactaatttcaatgatgtcaaagatctaaatgatcccctgattccggggctttttgattaattgtttaactcgtcccattttaacgggacactaatgagaaaagataataaatagaatgggggcaaacctttgtctgaaaaacattaatgacaaacacagtcctacaaaaggaataaatgtcattattacagacaagattacaattaaggctaaagaaatagcccaatgtcgagaattagtatctatattgtatatcctattgtttatcaacattaccaactcttactttattggctaaatataggcgcaaaaccaaacatcccacgttcgctataatcaaagcccaaataacacttcctatgctaatactgtgagtaagaatcaagacaaggacaacaatgatgtatatgattgcagaataaatggttgtcatatttacctcattgatttttccaagtacgcccaaataagggaaaccgaacatgtcagctggcacactaatcgccaataaaagcaagaataggttgaaatacgtggttatacttgctgtttcagtcttaataaaaatcggtataagatacggtgataagaaatatatacaagctaaagcgattgtattggcaatacataaaagcaataccatcttagtcgctctacccatattttttatccttgtgaaatatgggtaaaatatctgagataaaagcggagaaacaaatgatgaatacgcattatgaagtttttccgcagctgtatataatccgactgcaaaatctccaagaataaagccaagcactaaggtattcattgttttataggctctcatcaaaaaagttgatgagaaaaacggaatactatccttaagataaaatttcacttcttgtgccgagactatttgaagtttgatcccgtatcttttttgggcaatgaataaagcgacaatacctgaaacaaatgtttcaagagcatagcacaacatcaccaatgcataatcatcagtagacttaacgattaaaaaaataggcaatatacataatagctttattggcacgctgatacgtgttatatatttaatgtcctccattgaacggaaaagccaatagggagcaatgacaacccctatcaaacgaataaaggctaatatataaagcgtgagttcattccttagtgaaggaatcaaccctacaactaaaatataaacaaatagagaacagagtatgagaaaaaacttacattgcagaatagaagaaactatccttcccaatttttcttgattgtctctattattgacgacatgcctgacattagataaatcgaaaccgaactcattgaatatctgaaagtaaaagctaaatataatggcaaaatttacaagaccgtatttttctactcctataacgttcaacaaatatggaattagtagaattggtataatgctactgaaaccataaaggagaaactgattccaaatatttgacaacaatcttgatttgaaaacttggcttaatgtcatcttcttaaagcaatagattttctgtaaatctgcaatcagtatatgtgtacgtttattgggagggtaagtcttggtaaacttaatgattgtctacctctattgcttaaatattccacagaaatcaagtatcactttatcatctttccacggtagttctttgaaaggtgtatgggctgtaaggaacacaacaatatcggctttgtcataagcctctttatagtctgtcaacttgaacacgttatgttctttcacatttggctctaccactaaaatgttggcattattacatccttgcattactttagttgtgatatattttgctggagattcacgcaaatcgtcaatgtccggtttgaatgccaaccccatcattgctaccacaggcttacagtgatttttcagttcaaattcaaacatggcgttctttactttttcagcacaatagaacgatttataattgttgatttcgcgtgctgtagaaattatgcgactttcaaccggaaaatccgctgtaatgaaatatggatcgatagcaatacaatgacctccgactccacagccaggttgcaggatatttacgcgcggatgtttgttggcaagcctgataagttcccaaacattaatccctgccttgtcgcaaatcaatgaaagttcattggcaaaagctatctgcacgtcacgactgctgttctcagtcagtttgcacatttcagcggtcttgcaattagtccgatgcagcgtcccctgtacgaactgcgagtagaactcgattgcttttgttgtactttcttcgttcataccgccaatgacacggtcgttatgtaccaactcataaatcacattgcccggaagtacacgctcggggcaataggcgatataaattttaccttccaattcaggacgctcagcgaaaattaagtcacgcattttatcagtcgtaccaacgggtgatgtgctttcaattacatataagtcaccttccttgagaaaaggaagtacagcacgagttgccgcctctacatacgaaatatcaggctcatgattacctttgaacggggtgggaacaaccataaagtaagcgtcacttgtctccggcttcgtgcttgcgtgcaatgtcccgtttttcacaacttcttgcagcatttcttccatccccggttcaatgatgtggagcttaccttgattggtcagctctacaactttggggttgatgtcaacacccgttacctgtactccgtgctttgctgcgataatggctgtaggcaatccgatatagcccaagcccataaaacatgctttcataaaattgagtttaattgaaattcttttgattggtcattcatacttttgaacagttcatccagctttttcacaaaattgtctttttggctatcggaaagttccttatcttttaactgctctataatggaatgataaagagccttttctccgcttgtcatcttgttgtttattaataggaatttttgttatagcttggctatccatagccgcaataatcttgactataaatcaagcagtttttgtacgtttcttgtaacgcttgtacaaatgaacttttgaaatatactgtaactgtgaatatctgtccctatataagcaatagcctgttctctcataagaaacatggcctttttcttaatccggttgccatacatacccgctattgatggaagattaatctggaatttcacacccatgtcttttagctgtcggtaatccgattcatccatataagcataacgctccggatgggcgagaacagggtggtatcctttagatttgatgcgaagcaggatatttttcaagcccatcggaggactgaaataagaggtttccaccagcaggtggtcgccattctcgcctaaaggtagcaggtcattctttcccagccgttcctcaaagagattgtcaagcatgttttccgctgcaaggtgcagttgtacgccacctgtgtaagcagcctgcaattctgcaaaacggtcgcgaagatgggcagtcgtattgggaatgtcttccatgatgtgcggtgtgagccatacggatttgatcccttgctcctcatacaaacgtagaatttccaaagattcgtccatcgtttgtacaccgtcatccacgcccggaagaatatgcgaatgatagtctgtaaaaccgattagctttattatattttgtttttccctttttttaaaaaaccacatataatgacataaaactttttaatcattcccgattccacatgacatatatgcggaatccgggaatgaattgattgtcccggtgataaacttcaccaccagtttcgcttgccgaaatgatttatcaacccggccccaacacaagctaaaccgatacagatagccgcaggaggacagataaatccaccagccaatactccggcttttgttgcggcaaccactccgactcctttggtaatcaatgctgttttaccaaatacacctacagtaaccatacccgcaccgaataaggtcgctttgtcttctgtaaaatcgttctgtgccatagttgtgatttttagtgaaacaatagggaaatcaaatttacattcttactccgtatttaattgcttgataatcaacgatttactctatatatttttcatcggaaccatagtgatattccgaaccgtaaccatagtgataaccataccgatagccataacggtatccgtagcgaccaccgcttccctcggttccattcaggatcagggacatgttcttgtattttttctccccgtagattttctccagttcagcaagcatactcagttcaagcaatcctgcacgaaccacgaaaatagtacggtcagccagcttctcgattatctgcgtgtcggccaccagttcgatgggcggacagtcaatcagcacatattcgtattgttcccttacggtatctattacctgtttcagccggtcgtcgaacaacagttcggtggggttgggaggtatggtgccgacaggaaggatgtccagatatttctgtttcggattggtgacaattatttcattgagattgtcaatcctgccgccaagatagtcgctcaaccccttggtaggagagtcgatataggatgacgcagagccgtgacgcaggtcaccgtcgattaccaacactttcttccctttaatggcaaagctcacggcgatattcatggtcaggaacgacttgccgctgcccggattgaacgaggtcacgatgatgacattcgatgccttatccttgccagtcatgaactccaagttggtacgcaatacacggaatgcctcgttgatgatgtcacggctgccctccttgacaacaatggccctgacttcctgtggtttctttctgaatattcctttcttctttcttgtgaacagcggaatttcaccgatgaacggtacggttacgctttccagatcttttcttccccgtacacgggtattcatgttctcacatcattagtgtcccgttaaaatgggacgagttaaacaattaatcaaaaagccccggaatcaggggatcatttagatctttgacatcattgaaattagtcttgtcgaacaggtcacgcaagtgggttttgtcagtcaatgatatgctgagaatttgcaaaacttcataggttgaacgtttcaacttcatatcatgttggacaatagccacaagacagtacgtgataatagccacactgatttgtatgcgaacagcgttctctgttgtgccccagaatttctttatcttgagatgctgcttgagccatttgaagaacagctcgattaaccatcttttcttataaagattggcgacatccagtgcagaaagttgttttgcattcgtcaagaaagtgaactcacggtcatcctcttcgtcgtaatatcggacgagtctgaatgactcaggatattttttctcggagagatatccggtcagtttcacttccgcatctgtcattatgttctttggcattcttcgcttccatttgactgtcttatactttaagtttgtcttggctctgacaacaaagaaagagtctgtaagatgtatcctatagagttctttaaaggagtcataagccctgtcgaatatataataagcatttggttcataatggattgaagacattgctgtggaatcatgctttgaagcagtggttacggtatagaaagcaggaacttgtgcttcaatgtcgtataagacatgagctttcacccctcctttcttgcttcggaactttgcccatgggaatgttgcaagacacaacggaatcgttgttgaatcaaacgcatatttctttccggaaatgtcaaggatgttggtcgtccgcttctcgcaggcttccttcatcatatagaatgcaaagtcttcgaagattctgtaatcacggttctggttggctgtcgcaagagttgttttggctatcggttcacgacctaaaccaagatgatattgcttggccctatgcgcctcgaaagcaacgattaagtctcgcaggctttcacggttactcagttgtccaaacatcatcgcgagcatctgattccagcaagtgaaatgtttcacatatctgttgccatcatacttgcgaacatagttgttgaactgagtcctgttcagaaaagcggttaattgagagaatacgtatttgtcttggaacatagcagccatttgtattagactgcaaagttgcaaaatcaagtccgtttcattttaaaaaaccgcgtaattgactatatttcaataatttcaaagaactaattatccacttttacgggacagtagtgaaaaaacaagtaagctatgaaaagaaatttacgctttctggcgggagctttcctgttgacggcaaccgccctgttcaccggctgtaattcagacgatgactttttgatgaatcctcaaactgattcagtaactcccgaaacccgagccaactttaatgatgatggcactacaaccattacattcgatgacttcgatgaaacattcatggcggtttcgcctaaagcagagaactactacacgctttatggatatactgcagagaaccaaatcagggaaatatacgatcccgattttgtgtttgtctccgacatgaatactgtaaccaattcttatggagcgtatactgaattttccagtggtgccattgcgttgtcgaaatacaattatcgttctgattctgctgccggcaagacttctggaactaattggtggtatacttgggagaatcaatgtagtgtctataatacagcatccacagatggggccaatacaggggcaggtcacagcggttccaattttgctgttgtatacggctactctgatttcggaaatacggagtggatggccaaacctgaattctattttgactcccctcgcaaattcaagggtttatggtattgtaacacagcatatacctatggtgtgattataaatggtaatcagttcggaacatcgggtgttgcaacaccgttgagtaatctgaaagattctgacggcaacaatataggatatttccaagtcaacatcgaatgttatgacgtagatggaaatttgatcaccactgtatcgaaattgttggccgactaccgatatgataaaccaacagtgtcccccgtaactacatggacatattgggatattaatgtagcggatgtgcaaagtgtaaaattcaattttgaaggatctgatgtcgatcctatatatggactcaatactccggcgtatctttgtatagacgacgttacaatagaataacaatttaatatagtttggcatagaactgatttcagttctatgccttttttattatgcctcaaatccgcaactacgcgcctaatatgatacagaagcgaaaagaatctgcatcgttagtaaaaagggggcacagtgcatcgaatgtcaccataaagacatataaatgccccttaccccaccatgcgacttgaggcaatacgcaaaatcacgactataagttgtcggtgttatccaaagtcattctggaacacattggcataagcattgttgcatgaatagatattcagcacatacttccttgatgtcctgacccatttggctggcacagagatgaacttaaagacaaacgtcttgatgcggcttgttgctttgagtccgaacctcttcacgtcaagcctcgccatgatgaatttatagaagttgcgtatgagtgccataagcagaagaaacaccgtgttttctcccataaaggattttggaagcctgttccagccgaatccgttattcatatcatcgaagatgcgttccttccctccacggaggttatagaattcgacaatctctttctcggaagactcgtagtcatttgtaaggatgcagcggtaggtgtattctccttcccacaggtcgagttcgccgtctatccgcttctgtctttgaatcacaagacggtatgccttccctttccatttctcgatgagaatggaggccagctcaaactcaatgccgcccaattccactttcttccaacctctgagggcaaagatgtcattgtagagcgaactgcatcggttagcacggatatagaaggtcttgcagtgtttagcaatctcttccactatctcttcagaacacgagccgcaatcagctctgaaacggttgataataagcttgttttgttcaaacctttcaaagaacctcttcagcgtgtccttctggtggaaacggacatttgtgttgccgtcgctgttctcaatgccgacaatcaagttgccaataaccgccacgccagggcgataaccaaggaacttcttgtatgtaggcttcgcatcaaacttctcagcctctatgaactggtggtcgaagtcaacgtcatacccctcgccctctttcagctgccctgtggacaataggcaattgaggagcagtgtattcagcttgtctgccgtgttgaagtcgtaggtcttgccagtgtcggatgtgtaggaaatgttatcctgggtcagttcctttatggctctaagaatcgtgtcggcactgcatgtgcgaagtgtcggatgaagcgaaaggtggtacatcagatgagtggtgacatcctcgatgcatgagccgccacaaaaataaacgctcataagcgaacggatgatttcgctgtattgataaccatacagcctgcatctcataccgagggttgagtcgattacagatgagagtctggagtcaaattgctccattattgaaaatattcctccaaaaggagtgagtttctcggatttaattgctacctttgccatgtctgtcgggtttgatacatattttgatttgcaacactaagataggtgaaaaatctgacatggcaaattcctgagcaactttttgttgctcaggtacttaaaaagttatatttgtaatagtgttgcggaattaaggttatgaaggctttcatatttagtattcttgtacttttgttttttattacaagctgtaataagaacgatgtaattactgaagaaataaaacaagctcctataattgaactcgatagtgagactggcatttacactatcaaagttgggcgtgaactgacaattgccccgacatataaatatgcgaataatgcactttatgcatggacagtagatggaaaacttctttcatctgaatcaatattgaagtatacatggaatcaggaacaacatctatatatcaaattgcgagttgatacaccagagggttatgcggaagaagagttaaaagtagaagtattggagttaactccacctacaatttcaatcataatcccctctaaaggattaaaagtgcctcaaaacacggattatattttatctccagatattcaacatgacgatcttgaaaattttagaattgaatgggtacgcgatggagaaatcgtcggaacagaaaaagcatatacgtttcacgaaaaagaactcggtacatattcgataacaatccgggcatccaatatagacggagaaacaatccgtgatttcgacgtagaagttgtggaaacaatgccttattccgtacggtttccgacaccatcctatacacaaacttctacggatcgttatacttttgcagggcgtcctgtatatttgcggcctttgctggaatatttcgattatccacagtatcaatggcaggtcaatggaaaaattatggaagccgctaccgacagggtttttaaattcacgccgacgactcctggagaatatttcgttgctgttactgttacagaaaaaatgcccaacacacagccactttcacgtaacataacacgtagtaatacttcaattacaacgacagttaaggttatttgtgaagaaaaaacggaacaagaacgctatcggcaagcgacagcgacaagttcaggtatttgggataaggtttatgaattcattcctgctcccggacagtttattaatgagttatcccaaaataccggatttataggaaatgaaacgacgccccaacaagccatagagtatgcaacgaaacgattgaacaaaaaagcgcatgtttcactgggatctttcggtggttatatcatcatcggttttgaccatagtattgctccgagtggccgagaatacgattttgcaatacaaggaaatgcttttaacagttcgagcggtggctcaaatgagccgggcattgtttgggtaatgcaagatataaatggcaatggccagccagacgatgaatggtatgaattaaaaggatctgaaaccggcatcgatggtacaatacaagactacgaagtaacttactatagacctgcacccagagcacatactccgtgggtagatagtgaaggtaattcaggttctgtcgatatgaatgcataccatggccaagaatattattatcccaattggattaaagaagatagctatacattatatgggacgcgtctgactcctcgcaacaatcaagatcccgttacaggatattgggcgaataacgcttatgagtgggggtatgtggataatatgggttcagataatctggtaggaggaaatgtcattgatggtagcggtcagcgcaacggattcaaaatagccaatgcaatatatcatgacgggactccagtaaaattgcaatatatagactttatcaaagttcagtgtggagtattatcgaaaagtggttggcttggagagatatccacagaagtattttcatttgaagacttatcaataactaataatcaataatatgagacagttttggcttttactattcattgccccatttctttttttatcatgttcagaagataatcagactccagaaagtcctgctgatgccgatgacaattttatcacatcagtcgtgatgactgtggcaagtcaatcctatacagcggaaataattgacaatataattaccataacagttccatatactgtttcgttaaataatgctcaagtcgaattcaaatacacatcctcggcaacaattattcccgatccggcaagcattactgactgggatacggaacgaacgtttcgtgtaacctcttacaatggagaagcgaatgattatacatataaagtcattaaagacgagattcgctatgaaggggatgtggaattgaagacaacagcggatgttacggctttcattgatacggacgtaacggttatcaaaggtgatttgattatcgggtcggatgctgaggatgcagaagaattgtcggatatcgccgcattaaaaatattgaaggaagtcgaaggaaacatcatcattcggaaaagttatgttggacaagatcttacgggacttgataatatcacttcaattggaggtttgcaaataggaactgaaactgcctttgcgaccaacagtaaattgcagatggtcagtatgagatctttgcagcatattactggcgacatcgttgtctgcaacaatcaagtagcatatgtgcaattcgacaaccttgaaacgattgatggaaatataatattcaggacttcatctctacaaagttttgaattccctaaattaaccactgtcgtaaaggattttgatctccagtgtctgacaagtgacggagaaccaggaggagaaatcacatctttgagaattcctgaattgacaaaagtaaacggtcgcttaggggttaataatttaggcaaaatgatttctttggaatttccgaaattacaagaagttggaagtgtggattttgcttctataccgattccgttggagaccctttcattgccggaattatcggtagtaaacggcgaccttaatctcgtttccagttatattgcgtccgatgcttttacatctacgggaaataataaattacaagaaatagatggactgtctaacttgtcgattgttaaaggcacattgacaatatctaaattccaagtcttgaaaaaattaccggattggagtaaattagaacaactcggaggactgaccttgctgcgtttattggagtgttctgatcgaattttagatttgagcaaagtaaattttgtaccttttgaggataacgaacctttaatttctattacagacgggactatattctcaaaaattatcacaaaagaggatatgtcgcaagttagcatgtttctagctccgagcggtattaccggttcaagtgttggaatagatccagaattgaattttaagagtattaagaattttaagtattctagcaatatgacaacagatcctgtattccaatttgaacgagtttacgggaatatggaaattataagaggttcaaaaaaaggcgtttcagcccctaacttggtaagtgtagatggatatttaagcatcgaaactacaatggcaaacaatatctcgttcccgaaattggaaattgtcggaggtcagttatgtattatcggtaatctgaacgctgtttctaactatgattatgattttacgaatttaaagtcagtcggttgttcaagcaatcctcaatatatcaaagaaggggtgattaataatattttatatggttctttagattttatggcatcaaataaagattttacatttccgtcattggaacatgtcgggggtgttggtatgactgttcgtgccgtaaaaactatttcatgccccaaattgcaggccattgatggaacactttgtgctgcaaatgcagcatcgcttacgactttcaatatgccaactttaacaaaactctcaggagttcgatttatccggttgacacggtttgttgattatacgttcttcaaatcttttgtagaagaagagcaaatcaagaaagaagactggcttgtaaccaattgcggttataaccccacctacgaggatatgcaagccggtcgctatacccagcagtaacacccattattttacaagggaacagggtactggccgaaagaccggtactctttcccgtttataacaagccaatgaaacatctgatacgacatatcattcttctatgcgggttgccgctgttgctggcgggctgcatggagtgggactacggagatgcggtggaagatttcaacgctaccggagccgggttgttcatcaccaacgagggcaacttccagtacggcaatgccacgttgtcgtactacgaccccgaaacccaacaggtgcagaatgaagtgttcttccgtgccaacggcatgaagctgggcgacgtggcgcaatcgatgtgcatccacgacaataagggctgggtcgtggtgaacaattcccacgtgattttcgccatcgacctcaatacgttcaaagaggtgggccgtatcacgaacctgacttcgccgcgctatatccatttcctcagcgacgagaaagcctatgtcacccaattgtgggacaaccgcatcttcatcatcaaccccaagaaatatgaaatcaccggttacatccaggtgccggacatgacgatggaaagcggctccacggagcagatggtgcagtatggcaaatatgtctattgcaactgctggtcgtaccaaaaccgcatcatcaagatcgataccgaaacggatcaggtggtagaagaactgaaagtcggcatccagcccacctcgctggtaatggacaagaaccacaagatgtggacgatcaccgacggtgggtacgagggttcgccctacggctacgaagccccgtctctctaccgcatcgatgccgagacgttcaccgtagagaagcagttcaagttcaagatgggcgactggccttcggaggtgcagctcaacggtacgggcgacaagctctactggatcaacaaggacatatggtcgatggacgtggatgcggaacgtgttcccgtgcgcccgttcctcgaatacagcggtacgatttattacggcctgaccgtcgaccccgtgcgtggcgatgtctacgtggccgatgccatcgactaccagcagcagggcattgtctaccgctactcgtccgaaggtgaactgatcgatgaattctatgtcgggataatccccggcgcattttgttggaagtgatgggcaggatacgacacctataccatctcatcttcgttaccaaaggacgcaagatgacgattccgacaacgggaaaaggattgatgctcgagcggatgacacggatttttacagggaaaggttgccgcgtacatgccgccaatgcctttctcaaccacgtgcatgtacttgtcgagattccgaattccggggatttcagcaagatcgtgaacaaggtgaaaggcgccacgggaacggtataccagaaaaccccggaatatgccgacttctccggttgggctgccggattcgactcgttcagcgtgtcgttcagcgaccttcaccggctcagacggcacatcgaggagcagcatacaatccatcaggagatctcgttcgaggaagaatacggacaactgcttgaagagaatgggttcgacccgcatcaaacgtccgtgccggcatcctccacggtacatttttccgcgaatacccaccctaaaaacggaatcaaatgatttatacgaaatacatacttttctcgctactgctcgtctgtccgtccgtattgtccgcgcagggaatcacacgacgcatccaccagatagacgaggtcacggtgtggggcaaacgcccgatgaaagaaatcggcgtgcagaagacgaagttcgactcgctcgcactgaaagagaacattgccttatcgatggccgacattctgacgttcaattcgtccgtgttcgtcaagagttacggacgcgccacgctctccaccgttgctttccgcggcacgtcgcccagccacacgcaggtgacgtggaacggcatgcgcatcaacaatcccatgctgggtatgaccgacttttccaccataccgtcctacttcatagatcaggcctcgctgcttcatggcacgtcgtcggtgaatgaaacgggcggcggactcggcggacttgtcaaactcggtactacgccgcaggtcggcgagggcttccatgcccaatacgtgcagggcatcgggtcgttccgcacgttcgacgagttcgcccgcttcacctacggcagcgaccgatggcaggtctcgacccgcgcggtctattcgtcgtcgcccaacgattacaagtacaccaaccacgacaagaagataaatatctacgacgaggagaagaacatcatcggacagtatcatcccaaggaacgcaaccgatcgggttcgttcaaggacctgcacctgttgcaggaggtatattacaacaccctgaaaggcgaccgtttcgggttgaacgcatggtatatcaactccaaccgggaactgccgatgctcacgaccgattacggcgatgagaccgccttcgagaaccgccagcgggagcagacgtttcgtggtgtcctgtcatgggaccatatcaaagagaaatggaaagtcggcgtgaaaggcggttatatccatacgtggatggcctacgactaccgtcgtgaggtggcgccggacaactgggcctccatgacccgttcgcggagcaagataaacacgttctacggacaggcggaagcggaatactcgcccggcaggaaatggttcttcacctcgaacgtatccgtgtaccagcatctcgtgcgcagcgaagacaagaacatcatccttcaggatggcaacaaagccgtcgtcggatatgacaaggggcgtgtcgagctctccggttctgtatcggccaaatggcagcctgtcgagccgttgggcttgtcgctggtcttgcgcgaggagatgtcgggcgacaaatgggctccgctcatcccggcattcttcatcgacggactgatttcgcgcaaagggaacgtgatggtgaaagcctccgtatcgcgcaactatcgttttccgactttgaacgacctctactttctgccgggcggcaaccccgaccttaaaaacgaacacggcttcagctatgacgccggagtgagtttcgatgtcggcaaaaagggggtatataaactgggcggcagcgcaagctggttcgactcctacatcgacgactggatcatctggctgccgacgaccaaggggttcttctcgccgcgcaacgtgaagaaagtccatgcctacggtgtcgaagtgaaggccaaccttgccgtgcagccggcaaaggactggctgatagacctgaacggttcctattcgtggaccccctccatcaacgagggcgaaaagatgtcgcccgccgaccagtcggtgggaaaacaactgccttacgtgccggagcactccgcctcgctgacaggacggctgtcatggcggacgtgggcgttcctctacaagtgggcttactactcggaacgtttcaccatgtcgagcaacgattacacgctgacaggccacctgccccggtatttcatgagcaatatctcactggagaaaatgctgtcgttcaaaccgctggatgtacagttgaaacttgccgtcaataacctgttcaacgaggactatctctcggtgctgtcgcgtcctatgcccggcatcaacttcgagttcttcatcggcatcaccccgaaattcgggaaaagcagaaaataatgtaaacgtaaataaggtaatgatatgaaagtattaaagaatttgagcctgatggtgctgcttgcgctggcatttgcaggctgtcgtggcaagagttcccaacttgccgatttcaacaaacagctttacgctcccgaatatgcctcgggattcaagattgaaagagcagacggcagacagagcgtgctggtttccgtcatgaatccgtggcagggcgcggatagcgtcaccacccggttgttcatctcccgtaacggggaacccgttcccgagggtttcgacgggcaggtcctcgaaggggatgcgcagcgcatcgtggcgatgtcctcgacccatatcgccatgctcgacgccatcggcgagacggcacgtgtggtcggcgtttcgggactcgactatatctccaatcccgacattcaggcacgccgcgacagcatcggcgacgtgggttacgagggaaatatcaattatgaacttctgttgtcgctcgaccctgaccttgtgctgcttttcggcgtgaacggggccagtgcgatggagagcaaactcaaggagctcggcatcccgttcatgtatgtcggcgattatctcgaagaatctccgctgggcaaagccgaatggctggtggcgctttcggaggtcgtcgggaaacgcgcgaagggcgaaaaggtattcgcggatattccgatccgatacaatgcgctgaaacagaaagtgtccggtgccgttctcgatgccccgtcggtcatgctcaatacgccctacggcgattcgtggttcatgccctcgacggaaaactatgccgtgcggctgattaccgacgccggaggcgactacatctacaagaagaacacgggcaactcttcgacgcctatcgacttggaggaggcatacctgctcgcttcggaggccgatatgtggctgaacgtcggcatggcgaacacactcgacgaactgaaagccgcctgcccgaagttcgccgatacccgctgcgtccgaaacggctatgtctataacaacaacgcccgcaccaatgccgccggaggcaacgactactacgaatcggccgtcgtgaatcccgaccttcttctgcgcgacctcgtgaagatattccaccccgagttggtcgaagaagatttcgtatactacaaacaactgaaatagatgcgttcacgccccgtcatcctgttcaccgcgttgtccgtgcttacggtcggcctcttcctgttggatttggctgtgggcgcggttcgcattcccgtcggcgacgtatgggcggccctgacgggcggcgactgcccgcggactacggcgaaaatcgtactgaacatacggctgataaaggcggttgtggctctgctggccggggcggcgctatcggtcagcggcttgcagatgcagacattgttccgcaatccgctggccggcccctacgtgctgggcatcagctcgggtgcaagcctcggcgtggcgctcgtggtgctggcaggcgtcggctcgtcgataggcatcgccggagcggcttggctgggtgcggccgtcgtgctgctcgtaatcgctgccgtcggacaccgcataaaggacattatggtgatattgattttgggtatgatgttctcgtcaggcgtgagcgctgtcgtgcagatattgcaatatctgagcaaagaggaggcgttaaaggcgttcgtcatctggacgatggggtcgctcggcgacgtgacggtgccgcagctcgccatcctccttccgtcggtcatcgtcgggttgctgctggccgtatggacgatcaaaccgctcaacctcctgctcttcggcgaggaatatgccgtaacgatgggactgaatatccgccgttcgcgcggtctgctgtttctctcgacgacgctgctggccggcacggtaacggctttctgcggcccgatcggcttcatcggtcttgccatgcctcacgtcgcgcggatgctcttccgcgaggccgaccaccgcgtgctcctgccgggaacccttctctcgggggcggcggtattgcttctttgcgatatcgtttccaaaatgttcactttgcccgtaaatgccattaccgcactgctgggaatcccgatagtcgtatgggtggttttacgcaataaatcgatgacggtatgatagaactgtgcgatttttccataggctacgcagagaagaggcttctcgataaggtcgatgcctctttcaaaagaggacagctgactgcccttattggcaggaacggcacggggaaatctacacttctccgtgccatagccggactgaatcataattattgcggtaaaatcctgctcgacggacattgtatcgcaaacatgagaactccggagaaggcaaggcaactggcatttgtcacgaccgagcgcacacgcatcgccaacctgcggtgcgaggatgtcgtggctatcggccgcgccccttacaccaactggatcggccgcatgcagcctcaagatagggaaatcgtcatgcggtcgctctcttcggtcggaatggaggcgtatgccggccgcacgatggataagatgtcggacggtgaatgccagcgcattatgatagcccgtgctctggctcaggaaacgcccgtcatcctgttggacgagccgacctcgtttcttgacatgcccaaccgttacgaattgtgttccctgctcgcacggttagcgcatgctgagggcaaatgcattctgttctccactcacgaactggatatagccctctcgctgagtgacagaatagcccttatcgatacgcccgtccttcactgtctgccgacctccgaaatgatccgcagcgggcatatcgagcggctgttcaacaatgccgccgtacaattcgaccccgtgagcgggatcgtgaaatccatgccaagagactgactttcctgtcgggaaacacgtcagacgcaatgagggtgtcccaaaaagtatttggcaccctcgtattcgttgtaagacatgtcgtttatttcgatacctcgcacatcagcacgcctttccccgtcacatcggctttcgagaccgtgatggattttcccgtgtaggtcttcacgacggaagtcccggcagagttccacagtttccatgtataggtataagctgtcccgcccgtgtcgatttcctcaccgcccctgtataacacggctttggcatccacgtcattgccgttgttcttgatggtgaaccccttctggctgaccagatcaaccgtgatggggtcggacatatccgtgaaggagatgatgtcgcagacgaccttgttcgccgaggcgttgcccgccgaggtgtccgtatccttgatggcgcacttgaaggtctcgaagttgagaacggcatctgccgtaatcgtgatttcgtttgtcgtccagcctgccgtcacgccccgaggattggtcgaggtaaggcatgcccagccggcacccagcatggagttgtagtagggacacgaaacggcggctcccgatgcggctgcggcactcagtgcggaggtcagcgtcacgaccttcgtggaggcgttgactgccgaaatggtgtactgtgccgatcctatggttatcctgcctcccgcctccatgttcattaccgaagcgaccgttatggtcgtggctccggctgccgcggcagctgtcagtgtcgtgcccgcgaataccgccgaatccttgatgccccacgcgtaggtgacgttcgtcgtgtcgatagaggctccgcgccacaggtcgcaatgcgccctgagcgtcgccacctcgtcgttcttgaatacgatgccgtcgggtgcatacgccacggcggcgatcatcgctccggcgttcaggtgctgcgtgaactgaatctccgcccggaacggaatctccagcccgttggcgtcgatgtaaaccgcctcgaaagtataacgcacttgcggagcggaaacggtcatgtggttggctttgacggtaagggcatacttggccgatgccgcgccgatggtgcagctgtcctgtccggagacgatcgccgtaccgttcttgtaccacttggccgagccgctcttcacgcctgccgtaagcgtcgcggcattgcctaccgaggtgatctggtcggtcgccgcctgaccgctgacgaagagcgaaggggtaagtaccagatagggagaagccgcccacgaaggggcataggcattgttgtctctgttgtacacctgtgtcaggggctgcgaggagccgatgaatgcctgcaacgataccgcgtcgttctggtcgatgatggtgacctgcccgcgggctacttttactgccataatagattatcggttatttgttatttccacttcgcaatcgaaaacggccttgcgccacacgtccccgccggttatctctatctccctgccgtaacgcggtgcggcgttccatatcctgtcactctccgtatcgcggctcgtccgtatccagcggaaattgccgtcgggaatgagcgatgtaatctcttcaccgcccctgtacaccctggcacggagtaccgtcgagacgattccgttgcggaatgtcgtgccgttttcagactccacataaacagtataggagggagatccgtcgtaaagtttgaaaaaggtatgggtcgcactgattttttcattacggtatgttgccgtgtagcggagggtcagcacgtcgcgcccttcccagccatgaaacgggggtgtcatttcaaatacggcggcattgcatccggcatctttccatatgccgtcaacggcaaggtattcccactgccgactttccggctcgaaattgtattcggtcgccacaagcgggatattctccggctcgcatgcgcctgaaagctcgtccttgaaatggaacgccgtgccgcctgtcagggagacggaacggggcttgagcagttcctgcgcctcctcatcgaggtcttcccagcggatggtcacatcgcgcagttcgatggtatccttgccccacttgaaccgtcccgaggcgaaatggcccgtcccgtccggatggatgacgaaagaaccgtcccgtgaaacgatcgagccgtcttcgttcagccgcaacaggggattctgtatggtacccccgatacctcccttattgaaccaggcaccgtaatcgtccgtgtaggacaaggcttcatcggtcgcctgatagggggtcacgttccttccggcctccaattgaggggcggacaacgacagggggacggaagcggcaatgccgagacacatgacgggggaatctgacccgcgtatgaggaacgggacattataacggacccatcctttaccggcagccaccgtccgatcaccgacaagatgttcatcctgatagaaccggatggctgccgtatcttccgcttttatccagactgagaaacaataacagactcctgtatgagcctcccgccaggcggcactttgcgcaccaagaagactgtctccggctatccgtacacaccgcccgagtccggcgggagatgtttcatccagctcttccgaatggctgaaccggcaggacaggctgtcgggtatgacattcttgtggattttgcccacataaaacgtgcttgaaaaaccgttctcgtctcccgcggtaagcgtgccggctatattgacattgcgtgtggcatagagattctggaaataggccccgtaaccatccaacatgccgaagaccggatcgatgatgccgctgacctttcccacacgggccttgctcgcctcgctgaaagcggatacggaggcaagacgaacaatgttcaggtcggcgacctcgcaccagtccccctcggaggccaggcttgatgtcaggtcaagaaacaggctccggctgtactgtgccgggtaatccacggtgatgacccataacttgtacttccattcccggccgatggagatttcatcttccgcatccgtcttttcacggttcgtatagccgaatcggatcggtacggaacctgatgttttggaagacctgaccttgaacgataccagcaggcgctccgggtatccgaccggttcttccaatgtcagcatcagcccgaaggaagcgtttcctgccggttccgcgttgcggataatgcggacaatgcgtgtcgcttccgaatcggcatccagatattccgtttgcagcatgctgccataaacggcgtacctggacttgtccggcactcccgccatgcctccgtccatgacgggatagcacagggagcgttcggtcgccatgccgtcgatgacatccatatagggtgaatcgctgtcagaagccgtcaggtacaaggcgccgctacgtgccgtatcgaacaggttggtaatccgcacgaagtccagcagttcaccgccctgcggttcgtccccgtccagcaatgccccgatgaaataaggggcgtccttgtctccgacaagctccgttccggtttctgtcacgcacatcagcgaatagacggtacgctcccgttcggcatattgcctgcggatgatatccccggcttgcagtccctgtgtcttctgcgagtcgggggcaatacggatcttgtatgtcggataacggaatacggacatggattatgacagtttttccacggtgtctcccgaacagctgtcgctgatccagaaggaaccgttggttaccgaagtcttttcgacctcgaactcataggcgcggaacttacggcgggccaccacctcgtcgaatgtggcggagacgcctcctgtcgtccggttccggcggacagcccatccgcttccggaaaggcccggggaaaagaactccgaagagagcgacccggtaaagacgctgtttccgtaatgccggataccgtcctccaccgcttgcaggcgtaacgcctctgtcaagtataggattctgtcagtaatccgggtgggcgacgcatggattccgatatgcccggctgcttccaacggaacagcgaccgtaacgaaatcggcatcggtgcggatatggaacgattcgctgtgacggttctgcggggcataacagctcacggacggacggtgtgaaaaatccgtgctgtgagggatagccgtccttacgtcctcttcctcgtagattacctcggaagaaagcgatacgcgctccctgtcgcctgtgaacataaatccctctgctgtgcccatccgcaagcgcttgtggataacgataccttcatcggaagtgtctacccggtatgaggagagcaggtcggcgccgtagttgtggcggacagtcagcgagcccggaaaacaagcctttccgtaaggggaaagcatcagacactcgccgtccacgtccgatatgccggagaacaggcgtatcttcggggtatggtcgccgcctaaaagaaggtcaccgccgatactcccgaactgtatcttgtccttgtcggtacagagcagtacgggaacatctccgatccggatgccgaatccgtccaggaacgagaggaacccgccgagcgcgacatcctcttccgaaaacgaaagcagacatttccctttgtcgcccagttccacgccttgcaaggctttcagtccgccatccatgaccgtactccctcgcaccgtcagattccgtctcaccatgccgtcccgcatcgtccaatccaccgtgtccgtattggcgttgccacgatgatagacatcctgcccgcccacggccagccgtgtcggggagatggatattcctgtatcctcgtccccgataatccatgcccctttggaatgtaccgtcgcatccagaaagtctatatgggaagcgttgattgtagcggtggccttgtccgcgtcgtaacggagcaactgcctgccgccgatatgcaggctgtcgcccccgactttcaggttgccggtaatcctgataccgtactcgatggcagttaccacaccttccggatcggtaatgtcctgcgaataggtttccaggatacgggtgtttccaatgccggcttcgaaaccgtaattggcactgagcttgccggtcatgtcaccgcccgatttcttcaggtaatccaacagcaagccaccgcttccggaaccgccttctcccgtaacggctccggcaatggcggatgcaaaaccgtaagcggtattcttcagtctcaggctggtctcgtcgccttcctcgatgccgtaaggatgctcgtcgtcctttttctgctgggcattgaaaaagttatggtacagctgtgcatagatggaatagcacaggctctccttgtcgagggtttctatatcgggatgcagttgtacgctcatttggtatagctggtcttggaaagaaatttctggatacgtgatgtcagcgagatgaagttcggcatattgatcggcgacatcgtgcccatcagtgtgggagtcatgattttcgaacattccgtcaggaagtcgagcatcagccgggcaagctcattacccagaaccagcggctcggtggcattctcgtcaccgagcgtcaccttgttgtcggcaacggcaacggtcgtggaattgaccttttgtaccactttatctgctgtctgtctgacttcagacttgtccaccgtatgcgtgatgctttccgcatcgataacggttgtcgcttccttgtccttgtcattcctaacggttgttgtgacggccgtcggcgtatagtgggtggaggtctcgttaccggtggtttccagttcgtcgtagtccggggaagagtcgttttccggatccagttcctccatttcggtcacgccgatgacggtttccgtgcgggcattgagccgcaggatatccacatgggagaagttaaccacataggcataacgggtggcggcatccatgaagatggtcacgtcggaaaaaagtgcggggacgatcaggaagccgccttcgctgttggtggcggccgagagcaacacgcctttatggataacaggttcggcggaggccgtctcgtccgggtactcgccgacatcaatggtaccgccgtagtcggaaaactcctcgtccgaggggttgtcgtgtatcttggcgacatagccgtgtatcatgcgggccgtaccgataccggacatgcctccgggagccagattgatacgctccatactccgtcccaaggctatcttgcggatagcctcacggataagcaactggttggatttgtctgaagacatgagttttttgaaagaataggaggagcatagtttattggttgccaattattttgtacttttgcaaagacaatgatattacttatgaaacaagaaattttagaatcctatattacatatatatttgatttctttcaaaaatcaagatgctttaaagccgggcaaggtaacatgctcagaaattttagatttgcagctgaaaagcaatttactcgtaatcaattgggtatattgtatttcctggtaaataccctcattgataatggctatctctacttaaaagatagagattttatagctcttacggagaatggtgccgatgttataaatgggggagagtgtgttattcctaaaatttcccttgagcggacaatttatgaaaaagagaccagtagatcagatatatatgaacagctttggaatattatcggatcgaacaaagaaaatgattatgcgccgctgtatgtagatggaccattgttttataatacaatcaggccatatttaacaacattgtcgttacctcatacatatggggaatatatggcagaattgcgggaaaaggaagaatttacatcaagaattaaatggtataggactttatttttagctcttgatgagaatgatgtacaaaaattcctcaaagatttgtctatcaaaataaacaggctgctgctaatgaatactccaaaagatgcgatacaagaagctttgaatccttgggcagatgtagacattcctacaatcgataatacgcctctgcctgaaattctcaataaagtggcggaagaaccaattgtgaataaaaacaagccgtttgtgttgatttcgtatgcgtgggaggtagaagacaatgtctttatgaattggattcaaactttcgccaaagatttgcgaagacgagggattgatgctcaaatagaccagtatcaacctcatggaactgacttgcctaaatttatgcttgaaagcatccgtaaggcaactaaagttctgtgcattctgactccaaagtataaagagaaagctgaatccggtaaaggaggtgccgcttatgaagggggtataatatcacatgaaatatataacaatcagggaaccactaaatttataccggttgtacgcaaagggtcttttgaaacttcgacaccggatttcattagtggaagaaaaggttttgattgctctactgacgataaatacaatagcgaacttccgaatattatcaaggtaataaacgaagaaccattgatagaaattcctcctgttgaataacggtaaatcttatttcctaattttatacggaatactcagttgttgcctgtatccacccaccccgaaagtagtcgttacctcttccacgaggtatacgccgttcttggaaggattacggtagtcgatcagttccacctgtacggcaggagacagtccgaaatccccgaatactgtcacattgccggtgattccgttcagattgtaattccgaaagtattccgtcgtctcttctacaagccggtcggaattgattccgacatgaggtgacatatatggtacgatggtatatgtggataaatccaccttggtcctggtcttcgctcctgatgccgtcgtgttgcccgttactttgtgcgtcttttttgaaatctgcgtggcattgaccgtctgaaactccttgctgcccggcgtcgccgggtcgtattcaggattcatgcgtactgtcacctcaaagaatttttcatccgtcccgagtgccttgcccgtcaccgccaaaaacttcggatcggtcttgaccactttcaggttgctctgcgccacatgctcgttgaagtatatcctgtacggtcctgtcgattcatcctccgggaataccggctgagccttgctggacgaataaggacgcccgacggcaatggacggtatggccccgtcatcatcggcatcgtattttaaaaaacagtagaccttgtacttcgaccattcggaaaggatatccgctaccgtgaagttgtccgtgacctttaccttgccgatatgtatctcaaaccgcttcgtatccgagtgtatcctgaagccggtatctttcaggatattatacttgccttccagcacctcgttcaccgtcgtccctttcgccggggtctcgaaatgaggtgcctgtttcagtttgagtttgtaggccatattctcacactggatttccagcgtgctgtccgaattgtatccggtaatgtatccgtcgaacatatttttcagcacgccgttgtagcccagcttgatattgatgcgctgtccgaccttgaatgtcgtctcgtcaaccagacgctgcgcgctgcgtttctcgatgatgacaccgtcctgcatcacctccgtcgttatcctcgacacgtccttgccctccaatgtcacgttcccgataatcgtggagcggcataccgaccctttcggaaatatcactttggccgttccgatcagcttcttgtaactctcgttgatttcgagcgactggacttccgtaatctccacgccgttctgtatcctcatcggattggatgggtcggcatccccgatggtgatgcgacagcagaggatatccattgcagctatacccataaacgtgtcagtttaagcaacgaggcggggtcgatgacctccgtaccgaatttaacatacttgatccacttgttcgtgtgcttgatggccgtgtccaccttttcctgttccgccagtttcagttccacggcttccgatggctccacggcgacacagttcagcgaatacggctgcacgttccggcaatccgtaggctgtaaggtatagccctgtataatcaaccgtgaaatgttgaactggcgcaataccgtgttgtcgcaatcgatgacacccttgtattgtaccagcctgataaacttggacacttccgcctcgggatacacgtccgggtatttggaggtgatcttgccgttgatggtaatctcgaggtcacccccggatatatattccttgcgggtatagtcccgcccctgtacccgggtcagcaggatattgttccggctgctgacctgtacctgcggtcccaggtccacgaatgtcaccagtccataccggctgttcggcaaaaccttgcactcgctgttgtcataatacttcccctcctctgatatggacagttccagaaaatccgccactgtccggccgacgatggaatcgatatggtttttcttctgcgccaccgcctgctgttccctgatgagctggtagtactgtccggtcttgttcgcaaggctggactgcgactgtgtctgaagatatttgtcccgcacctgctgttcccagtatttgaggtatcggggataggaacgtagcaacccgtaagccgtctgcgaggcaacctgtatggctgcccgtttgagcaggtcatggtgcctggagaagtaatgtacctgcccgtcctgcaattcggcaagccccatgcccaacgccagacgcgtggcgttgctgatgtatccgccaagcgaaccgtggttgagtatgcctccgctcaacaaagtcgaggccgcgatttgtatcagtcttcccataatcctttcattttatgcgttccaggaggcatcgaagtcatgcacgacatcgatgagcgcctgtgccagttgttctttcaggttctgtatctcttccgtctgcccctccttcgacttcatcaggtcgatggtcctgacactgagcaggctctctatgttcacgatgacctgtttaggtgccgccgaggacaaccgccccgtgccggaatagttgccgccggcccctccgtcatccagatgcgtgttggtaatcgggttggcagcaaacggacgtgtatcgttggaatccggttcgttgccgtactggtcgggagtgaagcccgccacgcggaggatgttctcggctgcctccgccgaacctccgaaagtctgccggagcgatgaaaagaacttcacgagtgtcgtatgtgccagcttgcgatgcgcgatgttgtctatacgctgcgcatcggtggcgttctgccccagtgcccgctgtttccatagcccgttttcgtcctgctcgaatccccaggccctgaactggtcaaagtcgaaccctcccttacgcatcagctcatgcgcattggcggcactcgatatggcattccgataagcggtggcggcacgcacaatctccggaacggtctgcgtgttcatgtaccgggcatagtcgtatgtgcgggcggcaaccgcttccgacctgtccccgatatcattcacatagacggccttgccatcctgcatacgccacaaagacttgtcgagatccttctcctgttgcccgaaacgctcctttaccgtcttgaggaaagcgtccacttccaataccgtacccatcttcccgaactcggcgtacgcggcatcgatacgtgtctggctgtcgcgtttggcaagggtgacaagcgcatcccttatgtcatcctgacgggctttgtccatgttatacacatggtctcgcgataccatcccctcagatgaagcgatggcaaattcccccaagaacccggcccaccagttggatgtgaaggctccgattttatgtcccgaagcctcttcgatacttttgccggcaacgacctcgtccacggcacgctttgtcttgacagccatgttataggtctcgctcagggaggagtaaagtgcctctatggacggataacggtacttgcggttcgattcgatctcttccagtacggcatccttcgcctcctttatcttccaggtcttgtaagccacccatcccaaagtcccgaccaatgcggctatacctgccgtggcggcaaccgcgcctgtactgatggcactcaacgaggcggcagcaccggtcagtccgctgccggtagccacctgtgtggcaaacagcgactgcaggactcctttggctccgatgacaccgcccccggccatcaaggcgcggttcatcgctccccgtcccgccacgcctgcggactgcatggccgacacgatggcccgcttctgggcaaacgaaaccttaccgataccacccgcccccagcagcccctgcacggcactgattgatgtcgtggccgcagactgtttgccgataaaccccatggcgatgccgatattcgtcagggctcccgccaccttgaacagccgggtcgcgacaacgcctgtaaagacaagcggttctatccaatggaaattgcgggtcacccatgcgccgatattgccgatcacggtgaagatgtccaacaaggcattcccgatggacaccaggccacgggtaaattccggagccttgaactttgccagaaaagtgcggagcacagtgcggatagagggttccaacacctcgtatgcctgcatgaacccttcggtcagctgggaggtcacctgcgcccacaatcccttggtcgtattctgctttaccaatgccagttctgaggaaacgccctgggacccccggttatatgaagtcagttctcgtagtttgtcgtagttcttcaggaacatcatcgccgcgttaccgccaattttcccgaagattgcctggacatccgccatcgacgcgcccttcttgttcaattcctcgaaaatgtccgctataggacggagtttctcgacctgcaccccctcgatgtcgcgcatttccgtgaaccggatgcccaggcggtccagaacttcctgtgcctccttggtaggtttggcaaaacgtgtggaaagagcacgcaacgaggttcccgccagcgttcccttcagacccatattgcccaaaagaccgatggcggcactgctttccgtgaagtccacgcccgccatacgcaggtaaccggcagccatcttgtatgactccgccatctccacgatattcacattcgagcgggaaatggtggaggagataatgtccgccacgctgtccatgctgtcgttatggatatcataaccggccatgatgttcgtggccaggtcggcgatatacgacacgtcgttgtcaccgataagtgccaggttcgtgatcgggcggatggacttgttgattgtctcgatattcatgcccgccatcgacaggtatttgacggcaccggcaatctccacggctgtgtatttcgtgtcgatgccgattttacggacatgacgggccatactgtcaaaacgggtctcgaatgtcttgaggtcgctgtccgccacacggaggatggaatgtgccgattccatgatgttggaatagtcgatggccttcgtcagttccgaacggatcaggctgtaacccatataggcattgagcatcgaagcgaacgggaggttcctgagtgacggcgctttcgaatactggatacggttgatggcggcacggcgtttactgcggtagagcgtaccggctgcagtatgttcccgctgcatgagcctgacggactgcatcgcattgcgctgttcctgccgtcttgcagcctgctcggcctttatacgttccgtttctgccttacggcgtgcctgttctgcctgccggcgtattttctccgcagcacgggcggcattcttgcactcccgttctttagcccgcgcttcatcggcacgccgcttttccgccgcggcggtttctgccagagccgccttacggcgctggtctgcggtaaagagctcctccgcgtggaccagtttctggcgatgcagctgctgtcctgcataaagccgttccatcagtttttgccgggccttttcgggcattacgaaggcctgcggagcatatggcaccggaacggaaggtgtgagtccttcggatggtatgcctccctgcatgttgaaagaaatgacagaagcacttttgatacgacccaatagggaaagtatctgctgcaacctgttttccgccgtcccggtcttgatttgcagttcccggtcacgttccatggaaaccagggcggagttgattttcccgatggctttggtaatgcgtttctgcgcgtctgccatcgtgccaacggacgaggcggcattcttttcgatctccgctttgcgcatctcggcagcctttttctcgtaaaggcttttggcgttggccttgattttcttgctgtccaaagcctgaccggcattgatggtcaggctgatgcctttggaaagcgtggaaatatccgtgagtaaccccttgatacgttccagcttctcttcgctttttttcgtatcgatggtcaggcggtaatcgaaattacgtttcttgccgttcttggtgcggaacacgcggtctatctcgtccatcatattcttgatgttcgtgacggccggagtcagggacgctttcgcctgtaccagcttgcctaccgcctcaccgaaggcgataacctgcttggtgccctgagaggcatccacgttgatggagtagttgacctgatagttctgttcctgagccatggtaatgggtactgcgttaaaagaatagtctttccgcaagggcggagattatgaaacgaaggccgccgcaaaccggaagcttacggcggcaggtcaaggagtcctctccggcaatgacatcggaacgggcatacggctgatgagcatctgctcgtgcagccacaacgcctcttcggaaagcatcgcgaactcctcgtcggaaatcgtgtcgaggttgacgccgggaaagtagtggcggacatagatcatccgctggcggatgcgctgctcgtcggtcactacccaccggcttataagtttaccaggacactctggcgggtggtgatcagctcggaaagctgtcccatcagaccgaacaggaagagcgactcgtcgtccacgagttccttatctccgtccacgaagcagtcgcgggccaacgtgcgcatggcgattacctcgtcctttttggaagcggccatgaatttgctgaactgcggaaagctcggttcggacatgtaggccacataaatctctttctcgccgtttgcggtgtctccgaaaacgaccatcggacaaatcttgcggagtttcttctcctctttcagtttgagggctttttccttgatcttgatctcctgttccaatgaaagcattttttcgtccatatcgaatttgttttgattcaccgaaagagtaggacaaagaatcgtggaaaggttgaagacacggttcttattcacttgtaatccatatgttatacaaaaaacttctttgctcctgatattcccagatcagtctttaaaggaaatttcgctgaatatatttcatatatttctttgatatatagtatataatcgttaattttgcatattctcaaacataaatgattatgtgcaaaatagatgattttatagatgtgacaagccggtacatcgctgaattgcttgatttgagggcggacatcaggccggtcgaaaaggatgtcttgcatacattcccagccaatattactgccggttatacattttgtacggctaacttgttggggcatgacgtagttcttctgtatagtgcagacagttctgcatatactccggggcagatgcggaaacaaaaagaactggttgagcgaaaagcccaatgcccggtaatatttgtattgcgtacagtggcggcctataatgtacggcgtcttgtcagacatcgtgtaaatttcatcataccgcaaaagcaaatgttcataccggatttgttgatagatttgaaaccgcataaaaataatatcgggggcggtgaagaaacgcagattcctgcaattgcccaatgcataatcctttatcatcttgaagtaaagtctctcgaagggaaaggaacttatgatattgcagatcttttcaacgtgtcgtatgccaatgtaaaccgggcggtcagatggctgaaagataaagaagttatcgctttatccggcggcaagacaaagagtatgatatttcagttcaaaaagcgtgaattatgggacaggatgttgccgttcctggcgaaccccatcgagcggattgtatataccgatagtctgcctgatgaagtattttgtattagtggagtaaatgccttgtcggaatattcaatgctgaacaaggaaaaaaatgacacttatgccattgcaaaagaagaagctcgacggttgcaaatccggacagacaaggaatatggcgagacccgcatagagatatggcgttacaatccatgttttttctcaaaaaacggcattgtagacaaattgtctttatttctggccatgaaggatatggatgatgaacgcattcaaatagaattggaaactatgataaataatatgatatggtaagaggaattgataaattcagggagtttttcaccggatatgaaggaaactatgtcatcataggtggtactgcctgtgaaatgcatgaagaaatatatgcacaaactccaagggcgaccaaggacatagacattatactgattgtggaggcgctgtcttcggattttgctgcaaaattctgggagtttgtaaaaaccgcagggtacagacaaaggaataagggaaccgggaacggggaatgcaggcatgaatattacaggttcaaggaaccgggaaatccggatttcccgtatcagatagaactcttttcacgaaatatcggggttgtcaaattcccggacgatgcccacattacccccattccggttgatgatgacctgtcaagtctgtcagccattttgatggatgatgactattataattataccattgaacacagcacgttggaggagggcgtacatattgcgaacattgaaagtcttatctgtctgaaatgcagggcctatttagaaatgaccgagcggaaaaacaatggagaacaagtggacagcaaacatatcgtcaagcacaagaaagatgtattccggctggttgccatgcttgctcctgccgacacctacgaagttcctgattcgcttaaacaagatgttgacaggttttgcctggctgtcaaagaagaagtgccaaactctgattttttcaaatcggcaggacttaaaagcatttccggagaacagttattggaacaacttgaagccaatttcataacacaacaatgagaatccaatacgcatccgacctgcatctcgagtttcgggagaacagcagttttttgaagcacaacccgctggctgttgccggagaagtgcttgtccttgccggagatataggatatatcggagatgagaactactccagacatccgttctgggactgggcttccggaaattacagccgggtcatcgtggttcccggaaaccacgagttttacaagatgttcgacatagacaagctgtataacggctggtcgctcaaaatcagggaaaacatcacctgccactataatgccgttatcccattgggtaacgatatagaattgatcgctaccacactgtggtcacatatcctgttgcaggatgcctatgaaactgaggcagccatcacagatttccgcaggatgcgttacggcagcgaaccgctggactggacaaggttcaatgacgaacattcgcgctgtttccgttttctggaacagagcgtaaaacaaagtactgccagacatctcattgtcgccactcatcatgtaccgtcattcgaactgatggcgccggagttcaagggcagtccgctcaatggggcatttaccgtggagcttggcggtttcattgcagacagcccgattgaatactggatatatggccactcgcaccgcaatatcaataaggtcatcggaaacacccggtgcatatgcaaccagttgggctatgtgttcagtaacgagcatacgtcattcgataaggaagcgcatatttcgatttaagtctgccatacataaatcccgtctgtcagccaaggtcaatatccggcaaacagacgggttattatgtaacaaatttatggttgactattgaagtcgtggcttcaccaacttcccgtcgataccgcatgtttccagaaccgcggtattttctttgttgaaggcgatcaggcatgacggcgctccggccgtaccaccctgttcccccgtaacatggtaaaaactgagccgtcccttgataaagagtattgaatcggcgtttgggaatatcagttcgtggaacaggcgcgtgtccgtgcgggcaaaagtgagcgcgacggcattcctgtgttcgacacacctgcggataaaccggacaatcagtgcagtgtcatagggaggattgcagaacacacgtccgaaccagggttgttgcaggccgtcatcctcaatggtatagtgatgtcgcgccgtatcccatgggcggtttacgggcgaacacggatccaaatcgaacggccccagcctccgaagcaggcagggaggcgtgagccattcgttctttccggtagaagatttcccctcgaaagttacatccatgacagcttagattgtatcacccgagccgatttggatatcgaacgggttgagatcgaattcatgggtgatattggtatcatcctgctgtgactcgagacaatcctccgtgaagatgcaacctttgagcgttacggtcgtcgttgtccagtcctcgccggccatcgggttggcaaagctgataatcaggtcgaactcgccgatttcgagcagcgagccgtacaccgaacgcaacagctgttgcgtggcatagtccatcgtgatgctcgccgtataggtaatgttcccgaaccccctcgacaccggccgtcctcccatgccgtagttactttcgaccttgcgcttcttcgaccatttgatggccgacacgccttcaagggtcgtggaaccttcatcgattcccagggcggtcgatgacagggttatcatcgaccacgagtatgctacattgttgattattgccatatgctatgtcttatttgcggttaatgacagtccttcctctacataaatcttcacggccacgcccaccgggacaaggacataggagatgcgcagcgtgtcgtccaccaacacgttctggttcgggtcgatagtgacggcgtatcctgaaatttcctgcgccgcctgcatcttggccagtatatccccgatgagtgtcttgaaagctgtaatcttcgacggggcgaggaacccggttgaaggattgaccatcagcggtgagttcacatacggcagcagggctgcacgcacggcacggcggctcttgttgatggtgcggttccgggcaatggtacggaaatccccatgtgagcatgtctggtctttcgagatgtagatcccgttctcgcggccggcatacttgatgggaaaaatataccccttatcgtcgagttcgtccagcagtgacggggagagtgactcgtaccggttcaggctgaggaagttctcctctgcctcgtcgaggttgatgtccccgaaccccaactctatttcctggaaatcgtccgcgaagagattgaactgcttgacccatgcgatggattcgtgcacgttggcctttgctatggctcccataaccgctcccaaaaatcccacgggcgtatggttcctgttgcacatctgcatcgtggagatcttttcgtgatgcgcctggccgaatatacagctgatacggcttgattcacagatgcatgaaggtattttattcaggtcaatctgacgcccctcagtcgtatccgcccccgtattggaaggattggcggaaaggatgagcgagagcggctggttctgctccgcaagccccacggccacgtcgttgagcccctttaccagattgaggttgtattgttccgatgcgccgttcgctttccacagcggctgttccgtccatatgcctatctggttgatcatacccccggcagcacgctgcatgatttccagcgcatcccagttcgccgaacagtccgcgaacatcacgtagagttttcctgaaccgcccggattgccggacatgcggaaaaattcacggatatggtatgccgggatgccgtgcaggaaattgacattcatctcctcctcgtcggttgcctccacacgttcgatgataccgaagtcgttcacggcggacttgaacgaggtgatgtagcagacatcgccaggcttgagcctggtctcattggttttaccatacccctccgtgaaaagcgtcggctggagggacacgtcgaacagcagtcccgtcaccttctcgcccgacgagccggtatcgtaaggaatattgccgtccacatccttgataaatacattaccgagtgccattatgatttctttttaagttcgttgtagaaaggattcctgtagagtacggccttgcccctgatggcggccgccgtgtccggcgcataggttcctccgtgcgtgtcgatgtacagcgacggatatgccgggaactttttcaacagggacaggatgtgaggctctgtcgtctcctccgaccctgcattccctttccccgcggtcttggccggcagcctgtcttcagtctcgccgcctgtcccgaggttttccgatgccgtttccggaacgggcaccgcctgagcctccggtgcaggaatattattgttgtctgtctgcggagtttcctccgtgttgattttctttgccataacagtagaatgaaaatggggaacggggccttgcctccgctccccgggtggatattgagaatgaagaaaggtgtgttattcgctcttcttgtaggcggtatggaccacgatctccgccgggcggacgatgttcacgtccattttcatgcgcatctggaaaaagaacagctcggagttggcctgcagacggtcgattttcaggatgtccgtgtcgttcgcgtaatccacccccatccacaggttggagtccatgccggtggagaactcgccgagcaccatcgtgtgttcggggattcccacgaccgggacgatgcgcttgcccttgaagcgatagcggttgacctcggtattctcggaatacttgacctgcttgtccgagatatattggtcatacgcgtcccaggcgtcccatccgaccacaaaggtcagagatgtcttctttcggatctgcttcggacatttcctccacatcgcatagagcgccgcctccaccgcggccccgtccgtcagctcggtcgttcccgaaatgatgcactgccctccggcaaccacctcggcatcggaggagttcacattgtcgaggatccgtttgatgaccccgtcaaaatatttctccttgttggctccgattttcgtgcagccttccggtgcggtaatcttggccaccgtctctcctccgcgggcggaagtccagatggcgtttccgatatactcgtttttcttgtccataaggagacggagcatcgtcgcctggattttcgggtcgagctcgcggaacacgagattgccttccggctgcgcgaaacgccagtacttctcgtagtccctcgggttaaactcgagatagaccataaaatcggacggctcaagatggcgttcggtgaactggtactcgttcgtgccgtcatcgcccttggctccgtggatgggttgtggggtcggcacgttgtcctggataatgttgcccagcttgatggcaggaagcgtatagcggtgctggatgcccgtcttgatatgaatcagtccctcgcggactgtatcattgccctgcacggtataggtcagcaagtcctcaagtacttcgccgctatacccgttttgaagaaagtttactgtatcagccattgtcgttttaagttttccgttgaagaatgaaactcggccgactggcggatacctgctgtttccgcgcgagacactgcggtctccggcatgtcagttaaaatcgggcggacgcccgcggatagtctgtcagagctttcggaacttgaaatccgcaccgaccacttccgccaccttctcggccatcagctgttcggcggtctttgtcgcttccgccgtggcctggatgttggcagggtcatcggcgatttccttcgagattttctcccgcgcgggaatggaagccagcgtgctttccgccaactcgaagttggaaccggccatctccacccactgcgttttcgcctcacggtcaatcttgccttctgcaatggcattctccaccaatgtctcgatacgggaagcctgctcgtccttctctttctgctcgtaggcggaaaggcgtgccgtcgctgcggccaggtctgtctgcaagttccggatggaggcgtcttttccggcgatgacggtctgcgcgtcgctcagtgatttctgtatttctctgtatttgggttccatcgcggccagttcagagatacgtgccatcacgtccttgacctcaccgtccttcatgcccagcgaggctgcaatcgccccgtactcaaagccttgtgtcttgttttcgtttgccatatcgttttccgtttctgtaagagtaggttcaatgcctttgaaaggtttatttcccgcgctgacacggctcatcagttcctggatggcggccgtatcggtcaatccttctatctcgtcatgcactttacggcaaagctgcttcgaggtatggatgacatgctccgcaggtatgatgccggccttgacggcagcctgtgcgtcgaaataggtcccgtcctttcctgcctgtccgtccatgatggcccgcacatgctccgctttcaggccgaaccgtttccggtaaatcgtctcgatctgtttggtaaaagccgttaccatgtccgacggttcccctccgtcatcgtccggcaacatcgggttatgaatcatcagtatggcataatcacgcatgagagaacgcttgcccgccgcccagatgatggaggccatcgatgccgcgaccccttcgatgatacattccgtatccaccgtggcattggcgatggtggaataggtggacatgccgtaaaggacactgccgccctccgagttgatcaacacacggatacaggagggacggatgatattttccaaaaagtcgaactcgtcattgaaacgtgaggtcgtctcttccgtcacgcgaccgaagaaacggataacagccggctggcctgccttcgcctctccgacgacatattgaagtgtgttcatatccatatgcaagggttatttgaacaagagtaggcggtgggaaaagaaaaggttttgcactgctatttatggaagtggaaatatgagaatccatccatttatggaaatgcgattatctttacagtataatagattgttcaaattacagaccggttgcaactatttgtatcaagaccggcatgctgaacattctaaattcagcaagtacagaaaatgtatcatgagtcttgtattatctgctgattcatgtctgtttatacgcagtgcggataaatctcctgcatggatttcaatttttcgatccggtatccgaaaaaccagatacttcgtcatgttccggacgcggatggaagccgtgtccgccgctgtcatgttgcggcgcatcgctgtgttgggtgaacgggggcatgaccacatacctttttacccagtccctgtatttccacgcggaagattccctgaaccatacctcgtagtctatccagtacgcctgcaacatattggttgaaagcggcatgtcgaaataggtcaggttgcaccgctcgctcagcgccggctcatggttcttggcatcctgtatggctacattgagccgctggaagaccagaaacgcctcgcattccttgtcttcgtccgcattgttgagcgtattcaggataaaccgcacgcgcatggtggcgcgtccctcaccgatacgctgttgctgtaccaggtacctcacgttgataaagtggatgaacacggcagggaacacagtctcatactccgtgttatcgtcacgaacaatgcgggcgaactggccgttgtcgatagcgacggttttgaacaggggcggcgacaacgggtcgtccggattctcccgcagggtcaggacagcccgcttaacggcccggtatatctccacgaaagggttcgcggaaacttcttcaggcaggctctccgccggtgccgacggttgtgcgggctgtggtgcggggtgtttgtcttttatcatagcggctggtgtggaaatcctttaaaaatcatatctatgaaatggacggcgatatagtcgtccgttttcggtgagaatccgatgaactgccggtgtacgggacggcgcgtggaatactggtttaccgtgtacagcccgaacttcggatcggtattgtgtatggcggcataatgcccgtaacgctccttgctgcgtccccgcttgcccttgactggaaagctcttttccgtagtccacatgcaatacctggcgcctttccggaagatgcgcgtacggtccgaacgccgtcccactatgtctgtccggccggcttccgactgtatgctccgggccagagtccccgtatcgttcatgagaggatgggtgaacctctttccccatttggaggtacgaggcgcccatttgctaccgttgaatccccccgaagcgaatgaggacaggaactgctgcctggtatagtcaccggcagcagttgcgaagtcgaatacgttgaactctagccggctggccatgacgcgcgtactggtcctgcttacccagtggctgcaaaactcatcaagcgttatcttgggcataggcgaactttcctttaatgcgtttcacaatatcattcatgtaacccggaagcgggacggagaaatagcggtgcgcatcggaaaagatacgcccgccggttgccaggctctcccggaagaccggatccaccttttccagatagtctcccttatccggcaaagccgcccggacagcggcgaacccctccgcgaccagaaagcagcggcatccccattcgatcggcggtatcagttccggaggaaactcggatttgcggaaggaaatcccttccaatgaaagatgccaggcacgtacccgttcatcgccttgtgtcatgtaggtaagcacggtatccatatccaccgccatccaccatgcggccatcgaggccgcgaagaatacctggttgttctcttcttccgcatggacgaggttatacctgcggcatatcttttcgtgtgcttccatgtcctgttcatccgctgtctcgggcagttccccgagcatggaatactcctctgccgcggcaaaatccaccaggttgtctatggctgcaatcaggatgtcacgctgctgccgttccctctctgttgtaaaggagttgtgatttttcagtatctccaatgcccggtccatgtcgattcgcagacctgtcagcgcacggtctatgaggaaagaggcacgcagggtgatgatgtcctctataatgtcgagacgttccgcgctgttctcccaatagaggatcagcctgcggaatgcatcgaaaatgacacgatactccttttccgtatcggattccgtggttgcagatgccctgacagctctgaacggagcgttgtccgggagcggaagacgggcttctattccgctccccgcagaaaatttccgaccttcgccccccgggggcgtccgtaacgccggaaatactcctcgtccgacatgatgccccggtcgttgtggctgagaccggatgagccgccttcggctccgaaacctaatcccgggataacattgagctgccggcccacattgataccgaactctttctcgatctcatcggccgccacttcatatttgtccgtgatcagcgaatagagcttgatgcggtcctcgttgctcatctctatccggttcgaataccggaactccaatcctccggggatatacccgatagccaccaggcgggggattatctcctcgttcatgatgttttcgatataccgacggtagacttcgatacggtcgcggaaaatgtcctggtgtgctttcgtggaacccacgtacgactgcatccctccggccatcgactcggagccgagcacgaggttggcaacttccttgttcacaaactcgataagcccggtatatatcttttccgagttggacatggtgaatgtcttgatatcgacctcgtcctcaatgccggtaaccaccaccttgttctgtgccgcgttggctatctcgttagccagcctcttgcggtcggcgttgctctcgctgaccgtctttccgtggataatcggctgtccgtaagtatgggaaaagttcacatagttggccaccgtgaatttcttggccagtatcaaaggggtcgtggcggaaaaaagtcccaagtcgccggagtttaccagtacataacaacggtaatatgccgggtcatgtaaatcccaatgcggctcccacagtccctgccgcttcagtaccgttttctggtccggtaacacattacgccgttcgatgatgttgacttccgccagcctgcccgttctggggtcagtatgcggcatgatttcaagcagggtgtacccgtagagtttggattccactatgcccttgattatcttgtcgaactgcgaaccctgtatcttcagggagttcgccacgtccttgatgtattttcccttttcgtttacacgggcaagcatatagcggtcgccgagaatctggctttccagtgtctcgacaacggaacgtatatgagcgtcctgttgcaggcaggcttcatacaggtcaatgagccgggcgcggtcatcgagaatatatcccgaaccggtatcctgacgacatgaacggtagcggttgttgcgctcgatttcgcgaacatactcctgaattgtctttttggaggtcttaaaaatactctccaagagttccccgttaaatgatttgtccgatgtagccataatttttttgtttcttgttcaaagagtagagacaatcctcaagagaggtttttacggctaaaagaatatatggagaacgggactcttaatgcttgatttacaaaccgaaatatgcaacttaaatatatagatatttcggttttatttgcgttgtaaatatcttattatcagtaattaacaatttattaaaagtgtaatttatgtatatatttatagtgtatttcatattaaaaagatatatctttgcaccacgttagatacaaatccaagaacaatgaaaaagagaacatgaaagaagaaaagattccctgccggataatccggtacagggagttccccgatctgcttttcggaacgttacgggaagacggaccggtctatttcgacgcgacacgcttcatccaggccaaaggagatgcacgccggcataatgtccgtgatttccgtgtcgctttccatcactgggcaacggcgttggcagacgcctacggaatagacagggaaaagatgatcatccgtgacgaggcgtcgggacacctgttaattgatgaatgtctggctctattatttgtcgtttacatcgatcccgcgttcggtgtctaccttctggagcgcgtggacgaactgctgtccggtggatttacggtttcagacacttggctggtacaggctgccggtcttagatttacaaaggaggaattaacgcaaattttagaacaacatgagacgcagcacatttaaacgacccaagatggtgctcatcttcaacggggcacaggttcttgtagcggtcacgcgctcgctgcacagcgcggcggaattgacaaaaggcaacttgcaggctatctcattctgttgcacgggcaagtatgtatgcagcggcggactctatttcaggcatctgcatccggatgtggaaatcgagctggccgacctcggcacactgatgctgaaagattatgacgccctttgcggcgagaaacgcacgtactatccggtgcgcaagatggcacataagagagccttgcttgaaaacaaacgtaagtctgataaccaaaagaaaggaggaaatacctatgagggaaaataggaatgttccgttccgggactggaacataagggtttcccggaaccataacggccagctccatatctgcgccgtggatatatgcgatatactcaagcgggacgaactgcttgaaaacggcgccatcgcccgtgtttgcccgacggcattgaaaatcagtttccggaaaaacggcagggaacagtggggtttccgtcccatcgatatgcgtcggcttttacaactggtacgcaaggagactattataccccgtgacctgcttgatgaattggaagtgtggggcaacaagcttctggaactggaagccggggagctgcacgccgtcccgcaggacgacatcgtcatgcacttcgaggaagggttccccgtcacgttccggcgtgtcggcgacaagctgatggtcaacgccacgcagatcacgatgcacttcgggaaaatcccgtctgaatggctacgcatcgcttccacggatatgctccgcagggaaatggccggcaacggacataccgggaaatacgagtcgcaagtcttcaccacacgggggcgggggcacggtgcgacctggttggaatcaccgcttgtcataccgttggccagatggatcgcccctgacctgtctttggcggaatggttgggcgaggctatcggcaaactctccgtgaaacgagggaagacaatcgtacgcgaacgccccagggtggcggcacccggtctgccctgtatggattgtcccatgccgcaggatatggaatcggcgacgagactgattctggaactgcggaaggtggtgagtgaatccctgccgaaaatcgtattctacgaggagtttatcgagaacagggactggttcaagagcacgcgcatcgctgacgaactcggcatatcgccgcgacagttgcaccagttccttgccgaagagggcatctgcaagtacgagaagcggcaatgggtggtctttccttcctgccgggcctggcaatgcgatgtgccttacacgtgggagaacagccggggcaaggtatatactttcggatccaccaaacgatggacacaggccggacgggagtgtatcatagaactgtggcgcaagaggaaccctgaatactgcccaccgggtgcatagcgatggaaacggcattacagcggatcatccgcaagacaggaagacggccggtagagtgccgttgccgtctgtgcaggcagcaatgccggataccgtgcctcggtacgccggaagacatcctccggttgctgaaagccggatacagggagcgtcttgcacccactcggtgggcggtaggcctgctgttgggaaaaatcccgtatatcgtgccgatggtacaggcgaaacaggaagcaggcgggtgcacgttctttcaggacggactgtgtgaactgcacgcggcagggctcaagcccactgaaggcaggttgtcgcaccataccatcaccatggagaacctgaagttcggaatgtcgctctcgtggaacgtggccaaagaatggctggacgagcggaacttcgacacgatacgggagattgtccggataatgggaaaatagatgagggacggtttcatgaatgaagtatcagtataaccggttgattcctcctttgccgatttcatggaaccgcctcttattaattcataccatttgcaaacagttcgtattagtcgcggctatcctttatcaggaaaacatttaaacgcgaatgatatgaaactgaaaagcagaatgaccgtcggggagatgtcggaacacctgacggaacataccggcaagttcgccaaccgcgtatccgtggggcgttacgccaaaaaactgggatacgccgtgtataaaccgatgataaacggcaggatatgccagttctatgtcaatccgtcgattaaggatgacggggaagcggaaacattacggacgaacgaacgcgaaaacggacatgaaagggaatgacgacaaaaggcaacacgtgataccgtttatgaaatgcttcaccgggctggtcggcgcgttcaccccggaagaggtcatcttcatgctgtacatggcagaccgtacacgcctgcgtgaaaaaggttacgacaccttgcgcagcaagcggtactacatggagaacatggagatgggttcgcggattttcgacaagtgcgtggaaaagacaacgcgtatgggattgcttgaacgggtgccggtcagcgggatgtacgattacctgtggcacatggattcctacaaccggcttgtagggatattggcggaacttggaaatcctttttctaccagggcattctgtcatcggatgttcgatgtggaaaaaaggaccgtggcatccgtctctgacgaagaggtcagccaatggaaagagagacaccgaaaagtttgagcgtatctgtccacggaacgtaaatgaataaaaacagacggcatcgttgtgatttgccgtctgtttttgtgtttttgcgacataaaatccgataaaaccggaaggaggtggtagccgggtacaatattatccgggcaaacgacagaatatgctaaatatacttattcagttcttccacaagaagatgcaccgttgtcgaagattccgcttgtgccggcggtattccctccattcggcgcaatacggcttttgcgttcgtgatggcctgagcctgtttaccgcccagctccctgaaaacacgaccgcctgtaccggcttccttgttgtaggagaagcccaacaagccggatagctttgtttcatattgatttctgtgcatcgggccttgtaccaggttatagtgcagcaagaaccaatactcgaaagcctggttgctgtatgccaccctcatgccaccggcttccgccataccgatagcccggttgaaatcccgatcgggaaagtcatccttgtcaaataccacccagcactggtcatactcgcgtcctttcttccgctcttcttctttcatccgtaaagccttttggacaagacctaccgtattgagtccctggcctaccgctttaatattggcggaggtcaggcgaaacgcattgaaataatccggttccgtatttaccccctcgcagatgatcaggaaggattgtttgacctcacggacaaaactgatacgcctgagtgtccgtgccgcgcgtggatcacgcttgttcgtccgtgctgccatattcttcctccctcaggtcaaataaccgttcaaactggccgatgacagggataccgccatatttccccatcaggtactccttttcgaaaggtgcactgttgcgaaccttgtattccgccaacgaatagagttccgaggctccaaacgaatctttctgtgtaaaccagatctgatccctgcggaacaggcttgcattaagcaggttggtgtcatgtgtcgtgaaaatcaactgtgcattcctgggatttgtcactctggaattgaacagcccgatgatgcgactggtcaacagagggtgcattttcgagtcgaactcgtcgacaaccagccttttgccatgatccaacgcgtcgattataggataagccagcgagaagtatttgatcgtaccctccgactcgtttacgcggaacgggaaagtgaccgtcttcgtggcgttgccctcctcgtcatattgctggtgtgaactgatgactgtattgtcaaccttgcgtatgtcgtcgattccgaagtctgcaaaccgggcaaactccacaatacgccttttcatggacggatcatcgatctgggctatcgccatttcccaaatccgctcgtcgctgctgccaagaacaatcgtggtgttggccaaccatcccatgatttccaccgagacgctttcgttgaactgtgctgccacggaaagaagcagcgcattgtcgcgcaccatttttttggcgacaacctctttgccgaccgaaaatttgggatgcagttcatactcatcgccgtcacgcaggaacagttccacctcctttgccttgcgcttgttgcccttttgataaagccactcccggtgtacacgtttttcatcgacttcaaacccatagcggtattggaccgtttcgtcggcaaagaccgcctcaaaataactgggctcctgttccgtcctccggttgagacggaaactttccacccgtatgctttcgccggactgcacgcctttggaggaattgatgacaaaccatttgaagaaatcgagcgctttgactagattcgatttcccgctggcattggccccgtagatgaccgcactcttcagcaaagagaggttcgtaccttcaagctcaaaaacaatctcatcggaccgggtctgtttttctttcagcgcggaagcagccaaagacaaggtcgccggctccttgaacgaaaggaaattttcgactgtgaactgaataatcatattatatcgcagttatatgtaaattttatgcaaatataggggatatttttcatatatagatgttttatcggatctctttttgcggttattttcctgcacgtgaaaatcagaccgttttcgttcttgcaatgctgccctgcaaaaggcgactgcaattttccgaagcggcaacatcggcttgcgattcatgctcccgatagtggaatttgggtggaaagacgcgaaattcgccacatctttcccctcaatgtggtacaaatgtaccgtgtatctgacaggaggggtgttacaaatgtagcaacaatactataagtagtattatacaagaagaaagaagaaagatgtacttttttctttgacgcaaagaaaaaagataccaaaaaagaaacaaatcatgacagacggcacgccgtctgtttttttgtttttttgaatcggaaagtgttgaaaacggataagatgaggattaaaggaccacttcctccccagatacaagagagagaaacagaacgaataccttataccgtcaccctcttaccgtctggcatccttgtcgcggttcagccttacgacagagcgcacgcagtcacgtaccagttcggcatccctccgctccatgaaatagttcccgcattccaaccgtttcctgtccgccggcctgttgttgtccctgcattcacggatttccagtatgtcattcaggtaatagtacttgtcaccgcgtctgacacgtgttgccagccgttcgagttccttcagccgtccgttccatgcaagccctttctggcgtagagcatcggaaagcctgctacggccactggttccgataggcagtatctggagattcaccgcgtacccgactgtttcatgcagggaatagcgcaggctcccgtcttcgtccagcaggcaatacagcacaacacgtccttttgcgtcgatttccttgaaagcccccagtattacatgctcatccaggatactgagttttaccaactgtccgtctttgggagcatagagagattccgaacatacaccccggcgcttgtcccatgcaagatggccttcgttcagcaggcgttggagggcaatcttttgctctgcgctcgcttcccggcaatcattcagaaacatgaccgcgtcatcggtaacgagttctttgcccgcagtcatccttaccggaaccgacacgcaattacccgtgacatctcccacaagtccggtttccgatgtcccaccgttgaagacgaccattcccttgcgaatggacgacccacccgtgctgtctttcggaatactcccgattttcttcttatgatatgattccattctttcgattctttatccagatatttcctgtaacagcaaaatgccatacttcatacataagtggatacaatacggcaaatatacgtataattcaccaaaaaggcaggtaactgaaccccatttcttctgcatttccacggtttcctgtataaagtcacaaaaaccgtacaaataagtcggaatccatgtggatagcttcgttctgtatattctatatgattaaggaacaaaacattacaagattgtccgattgtgaaaagcatatccgaacatactgaatgacaggaatacacatcctccttttccgtcgtccaatccggttaagaacagtcaatataccgacgtgtctctatatattttttgatacgttttcagcgtatctaaaaaacagcttcaagccggaacccggaaatcgtgcagaaagtctgtacacccgtgaaaattgaaaggacaggcatccacaaatgagaatatttcaaaaatatgggacatggtgaacaccagcaccttaagcaaccatgataaatacaagtactttactgtatattttttgatacctgcttacagtttcaatccgaaagccgcattttgagccgttttggaaaaccggacttgaaaaaacggcccgaggacagagaccgaatccgcacccgagggtacaccctccccaatctttttatttttattacaccattgaatatcaataatttattaggtttacttttgtataaagtaagcctaaaaacgtcttttacattatctttgcttacaaattgaaagtaaaaaaatcttttcagtcctattttatccattttaagcagctaataatctgataatcaatagacaaaactgattttgattttatacatacgttgaaacggggcttttttgatttttgcaaaggaaaaatttttttcaaagaaaatcattttttctattttattgatattcaactatttacaaattcacttcgcgcgcgtgcgttccatattcgcaaaaaggctgtttttggaacgttccaaattttttttctcaaaaagttttgcagttctgaaaaacggttttataatagtcatgtactcgaaagccaaacaaacggcaaacaagtacggagaaaaacgaataaaaaaatagatagtaaaaaacagaattaaaaaacagaaaagcaaagaccgccgagagcgagaaacaaaaagccctttttgtgggaaacctatttttgaggcttggaaaatcaaaaattcgcctgttcgctttggagcgattaaatagggtgttaaataaccacaccgagcaggactacagaccaatgtagcaagttggaacggctaaaaacgtgtttttagtccgcatacgcaaagcacgcaaatttgggagtgcgagagttgtatggaaaaaggacgtgtaagaataatgccataattgcgcccttgtgcgctcggaataaaatgcacgatagcggtaaaaactatccgcatagaggacgctggtaaatgtatatgccaatgctatacccaatacccagctcggtggtaacgcctaaatgcctcaccttacagttagctgccggattgggaaagatccgggacgtgccagagaagcgtcttgccgaaattggagtaaagcagcgcagagccacgacacgagtgatgcgtgagtaagccgatacacgatatgccgaaaatgcgctcatttggatagcctgctatggggtacgttttaagtgcgacaaagttacgaaaaattttgccgtgcagggtgaaatgcacggcaaatttttgggcgcgtggcaggaaatgccacactttgcgctatggtgcagagttcggggttcgactccccgagtgcccgcaatgcgtgattttgcgcagtgtttctaaaattttatcattatggcaacttctaaattgaacaaggaacagtatgcaaacatcggttcgtttgcaggtatcatgttggtttacaactctaccaacaaggacggtgaactcgtgcagacggcacagcactttttcggtgcggactttgagcctgccgacaagtcggacaacgagattttccgtgtgattaaaaacatggtcgcaactatgtggcacaccattgcggaggaaaagaaactgcgtgccgatgccgacggcatacgctcgaaattccgtgccacaacccctgcggaaatcatcatctgcgagaagtcgggaaatcgtatcaagaagtacgaccttaccgacagcgtttgggcgcgtatcggtcttgtgccgaccaaagtagacctcgagaagtcaaaccgtgatttccaaaagacaatccatgccgctgcaaaggctatccgcaacgccatgaatttcgccccgaacctcgccaacctcgaaaagcctgccgagaaaacgaccaagaccggcaaggctgaaaaggtggcggaacagcctgccggaacggttgccgatgaaagcaaaaaggcggcataagggcaacggagtaactgaaacctgcccgaaaaaggcaaaaggacggcaggcagcccgctgaacgtgtgggactgcctgcccttttcgtatctgccgtcgtaagtgcgtgttcttgtggcgtatgccaagaatacgcgcttttcatttcgggcgaaagcaactgtaacgtgataggcgaaaagaatttcccggcaaaaaacggtgccgggactgtacctccgccgcaggacggggagtacaccgtggacgacctgaagaccgctctggaagagtccgagcggtcgctgcatgatgccgtcttcatagcccgccaagtgtgggagaaggactgcgatgccgtgaagttcgacatcgacgaccttgtgcagatagaatcggcattgcaggagatatgcaacatcaccgccggaattgacagcggggacgatggcgagtaacatgacgcgcatacgtgctgcggaaactgcggggcgtgcgcgctttttcgggcattgatatacactgtgtcaggattgcaccctgaaatgcccgcacttttctaaaattccctccgatatgacttccttgcgccgtgaggcgttgtgcctaccttgtatataacacggttaagcacggtctggcgttctgcggaaccgcctgccgtgcttccgctgttatcctatgcggggaagcggagaacggatgtgccaataataaaacgaataaatatgatagaagtgtttgacgcaaagcgcacccgcagttacgggtgctttgccagtttcaaggctgccaccgatacgcttgacagccttgccgcgacgggacagctcggaagtgtgcccgctgtcagcgtggcggcgtattgcagcggcgtgttacaacgggaatatgaagcggtgtttgtcggtgggaaatggcgtgtgccgaaatctccgaaaaggcggatgccggaaacgagacctgcccgtgggagacgtcggcggaaatggtgcaaggagtacgctacggcggagctgatgttccgagaagggtttcccgaccatttgaaccgcagttatccgctctcggcggacagcctgagacggtgcaaccggaaatgcagaatttatatgcaataataaaaacgcaatgagtatgaaaacattagcagacgtgaaacggaaaatgacgcttggctcgaagtggcggtgtgtccggctgttcgagggcggaaaagacctcggcgtgcgtgaggtcgggaaagtgcagggtaatgccgtggcattcctcaaacccgacgggaaactctcgtggctatggtggccaaaggcaaaggacgtgcaggtggaagaaaacgccttcaccgtgctccagaacggagtgcccaagctcaagtacatctatgccggataggtgttccggaaaaaatcatgcaaaataatatgaattaataatccctatgtttacaatcagggtaagccgcgatgatagcggataaatgaaaaagctatcgagattttggttagattaaagctgcaaaacctttactaactaaaacgacgatagccatgagagagcaaagaaacaaaattagtttcagaggacaaaagatttatgtaggaatcgacgtccatttgaagagttggtcggttacggtcttgtccgaaacctccgtattgaagaagtttagccagcatccgagcccagaagcgttgtacggatttttaactcggagttatccgggcgccgagtatcactcggtgtacgaagcgggcttctgcggattttggatacacgagcgtctgacggccttagggatcgacaacatcgtggtcaatccggccgacgtgccgaccaagagcagcgaaaagctgcgtaagaccgacaccgtggacagcggtaagctggcgcggagtttaagagccaacgagctgaaaggcatttatacgccggacagcgtatcgttggagatgcgttccttgataagattgaagaactcgataaccaaagacacgacccgtcagaagaatcggctcaagtctcaacttcggtatttaggcatcgagattccgcaggagtttctcactccgttttccaactggtcgaagcgctttttcgcctggttgaaggagatagagacgctcaccccgagcggccgtcaggccctcgacattcatatccggcatctggaagagttacgccgtcagaaactggagatgacacgggctttacggacattggccaagacggatcgattccgcgaaccgctgcggttgattatgagcgttccggggttcgggcaggctacgggaatggcgttcctctccgagatatgcgacataacccgcttccgcaatgccgaacaactggctgcctatatcggaatgatcccgatgtgccactccagcggagagaaagatgggacgggggatattaccatacgaaaacacgccgttatgcgctgtaacctgatagaagcggcatgggtggcggtacgtcaagaccctgcgatgaacctgttctatacggaacaatgcaaacggacgcccaagagcaaagctatcgtaaaggtcgcccgcaaactggtaaaccgtctattctttgtgctgaaacatcagaccgaatatgtcaatagtatcgtgtcatagagaaacccttccggtaaacggattttcccagagagaatactacatagttgttgcggcgttaacgtccgcttaaaataatctgctcctctggcctttgtaaactaataagggatatgcggcagagagctgaccgctaaggaaaatctgtttatcgaaggattttttcgggttctgaaatctcggctttcgagagagccaaaggtgttaagcacgatgtgcctccgcaccggctcgatcaaaggccggcggaggctctcgtgccttgacctttggccgagaagttcaccaagaaatgcaatacgctgtaaataagataaaaacaaatttaaccgaaaactttgatccaattttatttggattgtaacaggaaaacaactatgggggcggaatgcccctatgcttttataaacggataaagaaaatgacagaaataacgagaaagcagatatctggtctgcgggtaaagatgtattaacggctatgggagaggaacatagaatcaacgagataaaaggtgtcatcatcagccgtgccctgctcaaggaatacgggtatgatggcgatatgcccaccgacaaacagatgcaggtcatcggcaacgggttacttgaatactggggcgtaagcgacggtttcaaggaagccctcgccagtacaatggagaacatgttcggtgtaaaagcaaaagattaggtctatggaaacgaaagaacttactacccaccagcgtggtgttattctacgcggcatctgcggcggggctgcattgaaagacaagtcgccgcaaatatctgaaaacaataccgtcataacctgcgccggagggttggagatttgggacatctgctgcatcagcagtgatgccgaagccttcggcctgaaaccgtccttcggttatgacgggcacacgagaatcactttcacccccaaagaataagcggaatgaaatcatattactacttggactacctgcaccgtgaaatcttccttgaagaggaggatattcagaccgttccggaatcaggcagggcggacgatgcctgttccgccattgccgaaaagccgtatgtcgtggagcagttcatggcggactctttccggacactcaaagatgtggccagccgcctgtgcgattcccctgatattaaaagccgccacgatgcgctgatgtatatcgtgtggagggtggcactggacatcaaggagtggcggactctgagccatagcgaagccgccgtcaaggtaacccgtgaggacggtttcgtgtggctgcttgtatcggcggaaaatgcccggaagctatgggaggcagacgtattctccctgtacaggctttatgccgatgattcggaatccctgatcgaaagcgaggcggagctggaatcgaccatcaagggcggataccagataggtatcgaggtggggttcgcctctgtaatggaccatgccgcccggatgaagcaacaataaaaatcggaaacaatcaaataacgaaatcaagaagaaaggtatggaaacaacattattgacaaaggaaaatgcccatcgtgtgaccatggtgcggcgtgtggatgccccggaaagcgaaccggtagcgtttcttttcaggggaaagagacacgggtattgcagctattcccatcttgtagggaatccgggcaaggaagaaatcctcgccccggcggacttcaaggactgggaagttgtggaagtggcgcacccgggctatctggaagaatatttcaagcaggcgtgcagctcctacaacctcacctccttctcacccgacgagcggggtgagtcagacatcgcctcgcacgaaaaggaactgcacgaggatttgcagtcgatgcccgagcagcagcgggaacgttacatggaaaactacaaacgctatttctctgccatgatcgccgccaacagccgttgtgccagcgcgatgattacgggacctgcacgcttcaacacgggccgcaacgaaaaggcctgcaacagccacgccaagagcgtcacggcgttccgggaatggcgagaacgtgcactcgaagcgattcgcaaggctaccgaagcggccaagcccgaagaacagcgtctcgaggaggagtggcagaaggtcaaagcctttatcgacgatgccgcctcgaccattcacggtatcgatacgggtacggcacgaggctatagccgggctctcttcgtcagcaacctcgccgggcgactctccacctatgtcaaccatggcaacgtggaaatcatcgaccgtgccgtcgctcgtctgcgagagtggaacgacaaagtcaagaaacctgtcgtcacggcacgccattcaatcttcaagtatcccgaactcgtccgcaaggtgcgggaaaagcagcaggaacgggcaagccgtgaaaatcgtgagattccgttcgatggcggcaaggtggtctacaacttcgaagaagaccgcctgcaaatcctcttcgacaaaatacccgataccgatatgcgtacgaccttgaagcgtaacgctttcaagtgggcgccacgcaaccaggcatggcagcgccagctcacccgcaatgccgaatatgccgccggtcaggtgttgaaaataaccatttaatccagtgcccatgagatacatcatcgattcacgttatttcgacgggacatgcctcacgtcgatgtcggatgacatgcacagcgactacggcggcgagacgctggaagcactgcgcgaaagggagaagaacccgtacctggtcgctgtatcaccggtacgcatgacactgcttgtgaagcgttatacccgggcactttgcaagcccttccatgaaattacggaggaacgttattacgaactgctggaatgcctgcctccggcccgcatgcagagcgactggttctttgtcggggaaccgtattaccgaaacctgtacgcgctctgtttcgagtcggacggcaggtatttccgggcggaacgtcccgtacgtctttccaatgtggaaatctaccgccagattcgggaacacatggagaaagtaaacctgcatcccgccatcgtcaagaaggcttcctttgtcaaatatgtcaattggtacaaaaagacggtcacctacataccgtactatttcgagtatggaggtaaaatatatttcctgaagaacctcgccactcggacgggatccgaatttggcgaccgccgggaacggaacgagatggcggcattgctgaggaacctgcgcggaaaccgctacgaatactgtactttctactcccaaaagaaggacatcttcgagttttttgactggctacggaagaacaaatacacgctggaaatccagggcgacttgttcgactttgcggatgaccgctcccacgtggactttcacggcaatgtatgcgagtattcggctgtgttccattaccgcatctattcacgcaagctttttggccatatcattaaccagctacgcaccgtgaaacggtatcacgcgtggcataaaaggagggaaatacgatgaaaatctcaaatgaacctaccccatacctcctgctcaaggcaggaactgacagtgcatgggattgctgcgactttgcaatcgtgtacctgtcaaaagagtggagacagacacagtccggcaggctggaagccgtcaagccattcaaggatgacatcagtttccagtctttgaacttttatgacatatcggttggtttttaccagccggacgaggacgggatactgggcagcgaggacttgccggaagacaataactggtgcttcgtggaactgaccgaaacggaactggaaaggttggttccgccggacaatgtgctggtcagccatatcttggcggtatttgcaaacggggaagccagataccgggcgtacggcaaacataccgacgagcgattctggactgaaaaattccctttgcaacagattttggatatactggcgagtcatgaatcttaaaatttcaaagcaactatgacagaaatcatcaaaacggacggaacacgccaacccgtgcagccagccaatggctcagacttcacgctggaggagatgcaggcgattgtcggcggctacatcgaactggtggaactggacgggaacacgacaatggtcgtcaacgaggaaggcaaatttatccctctgtccctcaatcttgaagcgagcaggatattccgtgctcatcacccggcgtcgaaagacttcatcgttggggacgtacttgtgtgcaataacaatcaaatcagataaaattatggataaagagaaagcaaaagcgctcagcaagaccctcgcatgctacaaagaattacaagagaataacagtgtaaacctgatcgagttccataccgctgacgggcagaaacacggtatcggcaacccggaagccatcaagctgttgctttcggtggccgtcatcgaactggaacgccagctccggaccgcacagttcggtgatattccggaaagcctggagaacagccgcgagtacaaggcggccaaacagctggaatacgccatgaacgatttgggattcaagtccgaacgtttcgcccaggctcttccttatttccacaagacactggaacagacattcttcagaacggtaaaggcttccattaccgctatggcagggcgtgattcacgctgcattgacgaccgcaaccgtgcttcatacgagatgtgtcaaatgctggcctccatgctggaagatacccgtctgccctttatctaaatgccatgttcatagacgagaggacacaaaaccgcctccatgccgtgccgggagagagtatctcccacggcacgatgcgcacgcaggacctgattccggcgttcttggacgttatccgtgacacaccggagtacgtgcaggtgatgaatgccatccccgcccatgccatggaggacaaagaagcagactggtggaacagcgatgacgcggcgggattgctggaatcgctgttcgacacgctcgatagttactcaccggaggggtactatttcggtgctcatctcggtgacgggtccgattacggattttggaaaatggacaagtgaatgtcggaacatggtacggattacaaaagacaagcggcatgacattctcaaagacgggattcgtatcgggcaaatctatcttgcccgtgccgaaagcaggaaattaagatactgggcaatctcttgcatgagtggaatcggcttcaacactttcaatgaagcccgcagttatgccaaggatttcctttaataaaagaatcgcatgaaaaattggatacaacagatgcttttgtggcgtaaaaagacggacaagggcagaatgacactcggaaaggtgcagaaagagtatcgcgagaatgacgtatgcatgggagaactccttgatgcccttcccgccgacggcctttccatagaggaagctttcgagctggctatcaccgccaagaagtgggcggacggagaccgtttctaccggagtatcaacgatggagaaccggaagaattgtaaggtaaataacaataaacaataatgacaaatgagcagatatgattttataagattcggcggctttgtcaactgggcggacgaggacacggacacgttccggaaaatgaaagtctgcctgccggtaaaggagcctgtcgaagatgacacgaaaataggactgatttccacggacgaggacaatccggaagaaatcgcggtttcctattccgtcagggcagccgaactcatcccttggacggactcattccaggaaggatactggaaagccctgatagtggcagaggcaaacggagcaggcacggacgtattgctgcccatgctcaaagatgccggactatgcctgatggaatgtgtcttcctgatgctccggagcgatgcctgcaaactgtttccggtcctgtgccggctgttcccggaagtggaggaaatgtttgagattatcacatggaatgacagggaatattttgtcagggaactgacgctgttccgtggaacgggcggggaatacaaaaccctggtctctgtaacgggtctgcaagacgtgctggtcggcaaagacggcgcacccatatcggacgaggcggaggccgtggaccggaaaatctgctattacttcacggacgaggagttcctgctgccggaagagcggcttgtggcccttgcggaggatgcgtgagaaatcataatgtatgtacaaagaccagaaaatgaataaaagaatgaacaaacagcaaaccactcccgttaccgacacttttaaggggatgctacttatgtcaatgggtgtccctgtaggaaacatccgtccctaccgtttgaagtcggcaccttcctgcctcggcggtttcgagcgcatgagcgtagcggcagcacgagcctcgggaatggatatcccggagacggagaaagagaacgatgaagtttacatatgccgcttgggacccgccgtcttccataaatggatgcctgtctggatgttcgaaaccgctttcgaaccggttcccgagcagagacgcggtgaccgcatccgaacacttacggaagagatgaacaaccatcacgtggcggagaaagccctgaatgaaaaatgttacgccctgtccgtgaagctgctttccgagtgtggcggcagccttgatgacaacggtgaacaatcctcgacctatctccatgttgtggaccgtgaccccgtggaactggtcatcacgaacgcgtcgctccggaaagacgggaaaatcttcatcatgggttacagttactacacgggcgaggagtacgagcaggaatgtgacgtagaatccggcatggacatactgaattttatcctttcccaaaaaagttttgagtgccatgaatgaagacaagatattgcaaatgttcttcgacataggccggtggacgaaggccattgagaaaggcgtgctgaaagacattaggaaagaccaacttattcggctgaccgacgagcatacccgtatggcgatggcctatgccatgcgccggggaaagtacgagatttcccctccccacacggcgcagatacccaaggacaacggtgagttccgcacagtgtacgtaaacgagccgatggaccgcgtagtactgggtatcgccaacgacctgctcttcgagttgatgccggagatgctgcactcttcgtgcaagtcctaccagaccggtatagggtgcggcaaggtagttacggaagtcagccaccggatgacagaaaccggcaatagcggctgtctgggctggaagtccgacctttccaaatacttcgacagtgttccgatacggttcatcgacgaggcgttcgacaaggtggaggccaaacacggccagtctgccctgatagacgtacttaggaaatattaccactcggacctctatttcgatgaagataaccggttgcaaagcaagtatcaatccttgaaacagggttgtgctgtggctagctggctggcggatgtactgctctacgacctagacagggaactgtcacaaatgaacggctactacgtccggtattccgacgatatgctttttatcggcaaggattatgaaaaagcgatggacacactccaaaaacgcctggaagataaatccatgaagctaaatcccaagaaagtggaatacctggcagccgatgtctggttcaagttcttaggattcagtatcaagggcggcatggtctcgctctcgtcatcacgcatcaagaccttccagcacgagatcgagcggcggacaatccgctgccgggacacgacactggcaaaagccgtggacgccgtgaaccgttacctgtacaagggcgagttcagctgggcgatacaggtattgccggtctgtaatgtgaagagtgacctcaacgagctgaacaagttcgtgatggactgctttagagccgttcagacgggcaggtgcaagatcggcggtctgggatatgtccgaaccaaaccggatggctgcatcgtccggggacggggacgcaacgtgaaggccaaccgcgataaaacagaccgggacataccgggttacctgactgtcggctgcatgcgtaacgcccttctgaccagccgggcggtgtacaacacgctggtggcatcgctataagttacgccgggcacacggcagaacgggtggacgggcaggctattcaacgttacaggcttataaccagaatccatatcgagattaaccggtctaacacccggttaatcccatctcgattctggctgcgcctgtaatgtatcgggaaattaaagtcatgtgccgtctgtcccgtacccgttaccggagcacaccgggaaagttcaaggaataggtttgggcatcccgcgtaccaacgtcttctttccgagtctgaaggcggctgaccgtcgccttcggactccgcagaagacccatacgcgggatacatcggaagcataaagccatgtgccggtattatgagaactttcagtcttttccagcacgggaacgtgcggttcgggggaatggattcagcctgctgtccccgataagcccgtctcgcgccgtcgtatccctaacgttatacgacggcgccattccggcttccgccacagcagacatcggacctgtaaaggaacgtgccggcattccgggaaccgcaaaaagaacagcacagggcaaagggggcaaggccgggatttcaacagagccgcaattcacacggctggagcctgtgttatctcctgctaacacgacagatgacacaggttccagctgtactcgcggcccgtatcaggtttttaaagggatgtgccgtccggatgagtcccctgaacagaaggtagcgcgaccgcatatgcacgagggacccaaattcaagatacagtattcaagcttggtcctgagccaggcaactacctggttcaggaccgaagtcctactgtatttatcaggactataaagatacgcgccaggggtttgagtgccattaattgtaaacaggtgagaaaatggaagatatttaccgagaaaccgtcaccgccatagagaacggcgcaaatttccggattgatttccagtccagaagtttaaaagtaaacgggagacacatgatacggaacggcaggtatgatggcgctccgtggttgccggagtacggctgcggggattttttcacggatgtggaggagctgtaccgccgctataaacattcgataccatcggagcgcagccagagcaagtcccgccggtatttcatggcattgcccgaaagtgacctcgaggacggggacatgctgtacgggcaacaccgggataccgcgcaattcgagctggaattctatatcctctgccggattataggcgggttcacatggaatcccgaaacgatgggcaaatggttctggcaaagcgaaaaagacaaggacctggtgatactcagaaaatgggtggaacccggaagtaatcaattattaacaaattcacaatgagtagaaagaaacaagaaacaaaagtcctgtgccccggatgcggcacggaattcgccatcgcggacaaggaatttgccgccacgggcaccgttatcggcaagaattcggatttgggcaccgtctatccggtggtggccggccataattctcctgccggacttcccaaaggggcgcgggagcgtatcgaggcactccgcggtgccggtgtggacgtgagctgcctgttcgccatgcagggagccgagggcggcgagtatatcgcctccaacaaagacgggaaacttaccatcctggatgacaacgacccgatattcggcagcatcatggcacagggtaccgttcccaacaaccgactcttccgccggtgggtcatggcacaaatgttccatatgatgtcatacacgcattaccgtgaaaaagagccggcaggggtgaccgagatgattcaccggaaaggctatgattaccagtggaaaatgctcttgaacgagctgcacgcccagatgaagatggaacacaaggacatcacgggttttgccgagagaaaccgctggttcaaccgtgatgtggttttggccatcgcgagcgactatgtcaacgcgctgaaaaaacacgtgggcaacctggaaacaagaaaatgcaagggagttccctacaagcgtatacacggccgtaatattttcgtggaggacctgcaatccaaactgtactacccgctttccatcgcgataacccacatcaggcacgcgttggacgccacacagctttacaacgcggtcagacagttcaatgaccgtcgtatccggctgccatggggcactcctcaaagcaaggcatggatggatgcctataagggagccggggcgttctttaccatgcagaacctgattcgtttccacggttgcacggctgtcaatgaccggggtcggcgtctggacaagtaccagtcactgacgttcctgtcagccaaggcggaagagtataaaaacggagaaggctggcggttgctggcagtcctgaaaaaaatgctggcggacaacaatatcaacatcaaaaagaagatggcggcatggcgtaagaaataggccgtcatcaccatccgcccggtaggcggcgcggtgtggcgggtcagaataaattagtactccctccattgaaatgatgctcatccctgttaacacaagatgagcatctttcaatggaggcattacatcgaaaacgtaaagagatgcccctgtttgacgaccacaccgctattctaatcaaaacgacataatcctttatacgatgagcaagaaacaactacgacgcagggcctacctgctgtaccggttacgaaaacagggtatccgatgcctgacacgttgccggaccatcttctacctttacggggaggatcctaaatcagtaccgcagatttgcagcctgataagcgaattccatttccatgtccagtttgaaatacccgcctgacatgaaaccgggagacattgcaacgctgaaagtgccctacaagggctatcgccgtatagaactgttggaacggctccaatacacctggctggtacgcatctgcgagagcaggaaggagatcgaggtctatgaagacgagttcgaaacggattaaaggcacggaacaatgaaaggagaacaacaggaagaacgcgtaccgaacttcatcggcaatgccgtcattatcctcacggccagccatctgggctgcgaggtggagatgctcgccaccgcacaggaggtgtggcggacgaaacgcctgcccgaggcggtactgctgggcatgtacgaaaaggccgcacgcgatgccgtgtcggctgtccggaagagaggtctggcggaacaggctgaccgtctcggagagatattttacaggacgggggaatttcccccgccggaagaagacaatacataaaaaggagtaacaaatgaaaacaaggacttttcaggaaatatatgatttctgccgtacggacgatacctaccggagctatttcgaggcatcggacgagtcccgcattaccggagcaagggcaagaaagtactattacggcgacatccgccgaggccagtgccgcgtggggacattcatctaccgccagtcgatgcggcagcttgaaaggttcctcgggggcgcaaggcaggaccactacatccatgttgacccgccggcctgccggggagtgagcctcaaggacgatatgttccccggccagaccgcctatatcgtggtacatgtcaggaggcagggtgtgcagattgaaatcgaacacccgttgcatggtggatgggtgcatttcacggcacgctcccaccgtcccttcaccagggagggaatcatagccgaggcgaagtcctacattgacagccacatcctgctggcaccgggaagataccgggacttgcagctggaaaatatggtttccaaggaacagttccccgcatggtacaggctgtataaaatgaggctgcacgaccgggcggaagccgaacatcgggacatggtggacagatacaggcacaggaacgaccttacctacggggaagcccgtgacatgctcgcggcttcgggtatattcttcgacctgaactgcgacgagttcgagcgggacgagattacggaacaatttgtaagactttgtaacaagacataatacccaggcaaatgaatctatataatcaaatcaaatataacgggtaccgcatcaacatctattatgatgatgacgcccgaagcccgcgtgaagcatatgacaatctcggtacgctttatacggcacatcgtcgctaccgcccggagaaggagtttgatgaccacttcgatatcgacaaggtttttgaagggcatatcggaaatttccgggaatcgttcctgaaggaatatatcgccctgccggtctacctctacgaccatggcggcattacaatatccacctcgccgttcagctgcccgtgggattccggatttttcggaatcatcgcggtaccgttggacaaggtgcgccgggaatacgggtggaagaacatcaccgcgaaacgcaggaagcggatcgagggatacctgcaagacgaaatcagtacccttgacaactactataccggggaagttttcgggtatcgcatcatgccggaaagtgacgatgacaatgaactggacagttgttggggattctatggtacggaatgtatgaaagaactggaagccgaatgcaggcatattatcgacgggcagaacaaagcggtagcataaaatagaaaaatacgcataataactggaaatacaatgaagacatcatacggacttgaatttgacacggtaacagaaatcaatcctgaatggagcggctatgacaagacgatagcaggatgtcacctggccaatgccagggtggtcatcgtggatacggaatacgggcaaccgatagacaatgagcatgaccttgaagaaatctaccggattctcgaaaagaaaaagacaggccatactaaaaatgaacgacatggaagaaaaacgagataacaaggaaatcagggtacgcctgcaccatatcgaccgtggaaactgcacggaagtgtgggaggtgcagacagagaagggtaagcccaaacgctatctgggacgtgacgacggttatggaccgaaggagtggtacacgctctgcgatgctccctacggctattgcgaacgcgactgccatgtgagggaggacctcaccctcattgtctgcgacaaagattggaacgaggtgttgcgagacggaacggacagggaacgctttcctgaaagtttcccttcactggatgaagcctgcaacgaggcatggagcaaggtcgtgaaagtgcttccgcatgtcacgcacaaaggtttcgggcagtggatcaccaaacagtcattcctcccgctcagccagaccgaagaattgaattggcgggatagctactatgaggaagaagcgagtgagatactctcacgttttacatggatcggtgaagagtatgccatattcaaggttacccagaggcacaccaagtgcgacgcccaatggtacgagtattacgcggggaagacaaaccggcaggaacacgagtggtatacccgtttcttcggttacgagtaccatgaccggcatatcagcgacgtactccggacactcggaaggcggtgcgacgacatcatccgtactgcggtggaaacccgcacggaccactattacgggcgtacggtttcctgtttcatggacgagttcatcggttacgacctgtcccatgaacaggtccgtgacgccaaggaatgcagattgcgcaaggcacgggaagactacgacgaagcgaacgcctactattacaaactgaaagagaatgaggaaagcatccgtggtatcgaattgatgctgcactgcataagacaacaaatccgaaaaatgaaaagataatggccagaaactacatgtagccagagtttggcaaatcgaatacaaatatccgggtatgtatggcgggggcggtcaggatatcttttatgatatcctgacaatgttcgaagttgataactccgcagaagacgcctataccgatgacttcgaaatagcccgttcgggtctgcagcagctaagaaaacatatctcagaacaggatgaaaccttccggcagaatgccgaagaattttattcctgcctggcaaaggccgggatggaccgggaaaagtttatcgaagtacttgattgtctaatcaacggcagtgaccaaagcgatgcctatgtgcatgtctcatggttttaatgatatgccatgaaggcgtttcgagcaaacctgccgtaacatcaaacctgtatgaaacctaaagataacgggctggccaaccttcatgaccggaaacgtgaggaacgcggtttctgctgcatgcaactgatcatattccttacagacaatggagtgaagagctgggatgaatggcaccgggcgcataccgacgcggcccggggcgaatgcagataccgcaagcggtgcccggtttatggacgtagcaaacatttaatgaacaataaataatatggtacttaatattgtaaaaaacgacctgcctgcctcatgcattgcagaatatgtaagatgcgtgtttgacaatgccaaagtaaacatcaaagatgaaaatgcagtatccgtcgacatcgaagtgaccggaaagaacgagctgcactctttggaaggattaaaagagttggaatactattttaaagattatgacataagaatatggtgaccgccatgcaacgggcggcaaaccggaaattgttcaactacagataaaaaacaagcaacatggaacaggaaaaacctacaaagccggaaacagacagaacctttccggaagacgatgacacactttaccgtgaaatgacagtgcacatgccccgctgctattttccgacttcgctaggcgagaacagtatcctcaaatttgccggagaggaattccgccgcgtcaagaatattgtctgccggcgctacaactttaacgaggacaaatatatccgggagaacgccggcgtatcccctttcgactctgttcgaggcaacttcgagcaggaagtgtacagacgtctccgtaaggattatgcgcacctcagtatcatctccatcagaagatcacttatggagaaaatccgcgacgccgtgaagaaggagaacaacatcatcggcacgttctaccgcaactgcggcgtacattaccgggaggcggaatcagcggagtatgaaacctccccgatagtggtggtccacaattccgctttttacggatacggcggttatgaaagtgcgaccgtttatgaacttttcatcgacgggaacggcaaactgctctgcacgctcaacggcgaagccggcgaggatttcgatgagcccatcggacaggtacagaccgagggattgcttgagattgcccactggctggaagaacacgggttcatctccgctgatgtcaatgacgacgagattgtcgtatgcgaggggtgcggttcagacaatatacagacccaggcatgggtggatccgaatgcccgtacattcatcggtaccacgggtatagaccgctatgataactggtgcgacgaatgcgaggaccatcagccattctgtactttaaaagagttcaaagaacgcatggaggaatggtggaactcgttggacgcaaatcaaatggaacagatcacgggttgccgtcaggacaagtgtccggccggagacaaccatcaggggtttgccgaaacctgcaatgaatggtgggaaaacaagggctatgacgagaaacgtaaaatctggaaagaacataatgactgctgattatgatttacaatcttcttaaacgcatacagaacctgttggcttccaagccgtccgggacaaaggaggaacaggaaatcctgagtctggtcagccaggcgcttcctgcaatgctcaatgggcatgatacggaaacacttgccgccaatgagctgctggtacggatatgccccgacaccaaacggccggtcctcgtatgccataacggcaacgggcagtgcctgtgcctgcacaatgggacgacggaagaggatgccgtcgacgtggacttatggctgcgttccaacggtagagagtgtaacggctacaacaagttgcaggaggctgtcgtggaccttgcctacaatgccggggcggacaacctgtgggaggacagggactcccgtgccgtcaatgccgagatcgtccagtgggcggaagaattcgagactgagcatgcgggcactgattgggatgcggaggactacttccttgccatcgacaggttttacaaggaaaagacaaaacaaatgaatccggttacaataccggcgaactgaaaaaatggcaaccgaatggacaaggaaattgcagaagaaatcatccgggaaaaccgttatccgtccggatatgacatacaagactatctgtttgacaatgaggatactgtgctttctctggaggacggaacggagctgcttgatgacttcgacctctggaaagaacgttccgacctcgaacttgaaaaaatcatggaccggaactactggtcctcgactggtggatattagattaaaaacaggaatataattatggtaagagaactttatcaacggctcagggaatatttcaacaacttacccgaaccgacagaagaggaaagacaatttatccgggagctgaacgccgggtatttccctatcacgtccgtccaccgcgatgacctggaaggacaaggtttcgatgtggaaaagatcagcgatgacgacatgcagaatctggcggaaaagatggccgacgattactgcgaacagttgttctggcccagcatggaaatcattgccggagaaatcctgagtttcccgaaagtaaaaacaaaagacattatctgtccgaaatgcaattcggaaaatatccgttatgatattcacgaaagtcggttccactgcggcgagtgttccctggcatgggatgacaagttatatgcactcgtggaatttcccgaggaaagtgctcctttcgaggaagaaggaaccggttatccggcatggggaagcggggagaacggggcgctttacgtgcccgaggaagactatatacgccataccggcaaatctcccgaacgggacaagtgttaccgtgccgtgtgttggccggactcccagaaatacatgggaacgaaagattgtgaacccatacaggatgaaaacgggatacgggatttcggcacatcggcatactgggtgccgctgcttctgacggaagaagcggcagagcgacgaatggacaagaaaaaggtaccggtatgccccgaatgtgggggcacagatattgacattctgagtgacgagggcgtggccgtatgcaatgactgctgccttgaatggccttacgcggaggattgagaatggaaacggtagatgtttatacggaacgaggcgacctggtcacctgttccgattgcggcaaggtgatgctcctgccgtatggagcggataaatgtcccgcctgcaagaaagaaggttgcctggtatggacggacgaaagcttgcgggaagccgacatcgactccctgctcgagaggcactgtaacctgcaccagaagagcgaactgcaaccggaggagtatctttcactttccatactggtgaccgagtatattccatatctggccgataaaccgcagacagcgcgtgaaaccctgttcctactccttgaaaccggctctcttttcgagaaatactggcgggatacaagatgcttccaatccgaaaatatctacacgcccgccatcaagacactgcttgacaaactggacgtgaaactgcgagagggcgacacgattccggtagaataccaggattgccgctccctggaggacttcttcagggtcgttgccggcgagcgtccggcaaaggaagaggtatcgttttcttcagataaggagggaaactattatttcaacggacgcaaggtcaaggtggaaaattctgacgagtacgcctaccgcctgctgaaaaccaaaatacagacgagctaccggcgtccggtagatttttacttccgcttccttgcccgtttcggaccatacggaacttatggcaacgtgtattacccgagtatcacggacctgatatgcaggcgttacctgcctgaaaccgcaaaatgaattccggaaaggcgatggacaacggttcaccgcctttcttattgtataacttttttaatatcaatcattatggcaacagcattagcaacaacggccgcccccgtgcagttcgatttccagaacaacaacgtcgaggtgatgacgctcgacacgctccggcgcacacacaaggaaaatgacatctatggcaacccgctcaagggaatctaccattacgaggtgatagagcgcatggcggacatctgccagaaacacaacctgaattacgaggtggaggaaatcttcgccgcccagaacaagaacaaggcacagcccggcgtggtcgtcctgccccaggtggaacaaaagtacggggcgatggccgtcgaggcgcatatcctgcgccgcgtttatacgaccatccgcattaaggaatgggaaacggacgagctgaccacgacgcttgtcatcgccttccatcaggacggcatccaggcggccatcggcccgtgcgtcagggtgtgccacaaccagtgcatcctctcccccgaacgcagtgtgtcgaactacgggaaagacaaagtcaccaccgaagagcttttcggtcgtgtagacgagtggctctcgaacttcgaggtacagatgaacgaggacagggaacgcatccgccgcctgaaagcgaaagtaattaccccggtggagatgtacgcctacatcggattgctgacagcattgcgcgtatcgcatgacagttccgacaagcgtctttcgtccaaggtggagacctatcccctgaaccagtcccagatttccatcttcaccgaggacctgctcaaactcaccgaagagaagaagacgctcacggcgtgggatatctataacgtggcaaccgaaatctacaagcccggacgtacggacattccggccatgattccccagaacggggcgctggccgagctgatgctctcggaagggttgccggaatcttaaaaggctgccacgtgacaagaatcaagggacaactgacgacagccgactacctgcccatagcggaatataacaggctggtccgcgggcttgagaaggacggcgagtacctgtgggagacctactgctggctgtcgttctgcacggcatgcagggcctccgacgtgaggaccctgcgctggaaagacatcttaggaaaaagcaccatgacccgcatcgagcagaaaacaaagaaaaaccgcctgatcaagttcaacagggacgtgcaggagaagaaccgtttcctgtacgagatgctcggacaacccgcccccgaacagtacatctttctcagcccgcgtaccgggaaaccttactcgctggaatacatcaacaggctgctcaaggtattcaaggtaaggtacaggctgccgatcagggcattctccacacataccttccgcaagactttcgggcgctatgtctacgagctgatgggacgctcggccgagggcctgatcctgctcaaccagatattccgccattccaacctggaaaccacccggcgctacatcgggctggcgcaggaggacatcgacaaagtgttcgattccatacgtctatgagaatattttcaacgatgcccggaacccgagcgggaggttccgggctatgctttatataacatatcaaaatcagaactgtaaatggacacaccgatatatatcgacacatacttccgcgtcgagtccggctatgacggcggtcgcatgccggaagagaaagccggacgcttcttcgacgaggtaaagcgccttttcacggaaacagggttcagcatcaaggaaaacaaatacaaagacggttgtcccgaggtgtatctcggaaagacatgcctgtactgtcatccccaatcgttatcgggccctgttcttaaagagcacatggagcttatcgagaagattctggcacaaggaacgaccttccggtacctacgtactgacacttacggcgagattctcgacctgacggaggaggaagaactcgcgtattaccacaagactcatgacatgactatcgggggtgtctttctcgacgccttccgcaccaagcgccggaacctgtacaagagccgggagcaggtgctggaaatactcgtcgaaaagctgcgtgtcaagacactccgtgggaagtccgtttattcgaacacctccccggcataccgttatatcagggaaatgtacgggaaaatggtgtctgaaggacggctcgtcgagggatgcaagcaaaccgcttccgggaaactgccgctctgccgcacggcaaccggcagggaactgaaaatgaaaagacgggaagacgacaggacggaatgacacgcggttccgtaccggacatggccggataccagtccgaagacttctgtaaatcataattttcaagccggactgtcaatcgaaagaaggacgacccggctatacttcaacaacaagagatagcactattatgagcatacaaatcggaaaactgttgccggacggcagtgtccggcacatcaaggcgctccatgagacgctttcaaaagaccttgtgaggaaactccgggtgttctatcccaatgacagacgggtagatgccctgctgtcgctgggcgacatacaaaaactgggaccgtcaccctatggaaaatggacaggaaccggcgataccgtccactgtttttcaaagatccgtgacggacgggaaacaccgcggcaatccgcatcacgcatcgcggacaacgcagacattttcggccgcatggaggacacgtgcctcctgttcgataacggcagatggcatgtcatggacaagggagaatactgtgaacagccgctcttcgtcgaagatacgccctcccatgacagcatgaaaccgatcacggtatatgtgaacaaccatgtccgactcgaaaagataaatacaccgcagcactggcagggacttgaggaactcgccgaacgggaatccaggatactctatgtctaccgggggtgccgccttgtgagaatcgtccgttcgtccaaccttaaaaagaaactgtatgcggcacaataacatcgtatcggccatagaatggctgccggaacacctgttcacggaagagatcgtggaagcagccgtcgaaagcaaggaaatagaggtgctgagccatattccgggacgtttcctcacacccggacgtatagaacgaatcatcgcgggcagcacggagagctggcacagcttcgagctgcgcaatattccggaggcgtaccgttcgggagcagtctgtgactacgccatgcgcaaaaaaccgaagaatatcacggccgttcccgaagcaatggttacccgagaaatggcagaagcggtcatccgaaacggacgcggggatttcgacattctcgccttcatacctgaacgcctttgggatgcgcaactggcatacctggccttgcgcagctatatttacgacccgtattacacggacagcaggacagacgccgtcatgaaaacggggcttatcctcggatatgtccccgttgaggtaaagactcaagagttctattacgggatgctcgacgggatgaaaatattgagcacggttaccgatgccgtcgtgccgtcccgtttcaagactgcggcatactaccgcaagatggcggaacatgacctctcgcttgttcccgcccggttctattcctatgagattctccatgcggctgtctgttcgaccgaaggaaaaaacttcatcacagacccccagtttttcaagccgttgtcggtatatctggacgacatgctggcggaccggctgatggagaaacacccttacatgttcggggagttgccgaagcggttcaagacaccggaaagactggtcattgccatcgataacagcaaacgggagacgaactgctatatcgacgaggaaactgaacaatccctgctcacggtggaagtgtgcaaggcattcatccgaagaaacggcaactgtcccgaatttcctgaaaatgtatggacgcgggaatttgtcgactactgcatggagcacgggacgagtttccgctggttccgccagatgcccaaaaagttccagagctccgcgaacacgcaggcggcgtatgattacggtcattaccatatctgtgactttgccaaacggttcatcactccgcaaatggcgaaggagtgctaccaggagcgcagttatgcacatgccatccccggacatttcctcacggagttctgccgacagaccggactgcccgagaagttctacggcggggaaaccacgatgctgtcgctgaaaaacagccgtgacgactatacttactgcaaagtcggcaatacctgtctggccttttacctgaaagaacaatacgagccgtcctcggcacatctgatgatgacgcggtcggattcaaaatactgcacgccggagaaggtgttcgacgtgcctgtcggaaccttccaccgcacgtggctggaaaagatcgtggcggaaaacgacccccgctttgtcaaaccccgtgtggacaaagcgttgaaagccgtacaggcggtctgctattacggtgtcgagaagttgaaggacctgaaccgtacggaaatcttccgcaacaccttcatgggtgagaccatcggttactgcgcccgccgcagggacctgacctaccacagcgacaactgcgggacccttatcgagggcttgaagttcaagatccggggaatggctgtccccgtaaccttggcggaagacatgactccttatacggccgacatgctgcaccggaagttcggcttctgctatatcggaatgacggcattcgccacggactacggcctggacatggagaaggcatacacctttgcacagatgcgccagatcgtaagggagaaagggcacaagccgtcattgagaaactacaaacgtgaactgaaacaaataaacatcatacaatgaaaaaataccggatagctatcgaagagacgctccgtaaggtcgtggagatcgaggcagaaacgcccggtctggccgtctgcagggcggaagacgaatacaatgaagagaaacacgtgctgtcagccgacaatttcgcaggagctgacatcgcgctctcgactgatgacagcacggtcatggagactctggaagacgtggatttcatcggatacgtgcaacgccgtttcgaggaatgccgggagtccatatccgtcgaagacaaagtccggctggcattcggaagtttcgacaacgccctgtatgagttcggcgaataccgtaaggaggcggctcggaaccgcccgcaggtctacctgctgtaccggagcgatgcctggcacaaccgttcttccatggagctcatagccccgttctcctccctcgaaaacatgatggagtacctgcggcgtaagaagaaggaattccgcctgacggaaagtgatctggaagagttcaagaacaaccggcagacgaaggggcgcgacgaaaactacctgtacgagtcggattatttggatgtgctgccggaacaggaacccgaactgccgccgaaagatgacgctttctatgacaaggttttcacctgcgggcaatccgagctgtcacgcagggagttggaatctctgccggagccgttcgatacctaccatgttacggacgaagaaatggaacagattgtgtacgaaacggaaatggagacacgggaccggctgcggctcggtaaaagaaagcccatagattttgacaatgaccgccatagtgaaatctggtgggaagaaatggaaaaagcagtggtaaggcacggcgtaccgtactacgaggccgaataacgaaaatagaacctgttcatcacatgccataatgatgacgggccgtcgcggctacggctgcggcggtcttttttttcaaaacgaggtgagtattccaccccttatacaaaacgattacctactcttaaaaaaacggatttatgaaacagacaagacaggatttcttcacggcgaacggggaaggaatcaaaatcatgacatttacggagttcgcccggcatatcctgcgtatggaatgcggggaaagtctggaactgtatgccgttgtgaaccggcagacacgggaatgctcccggccgctctctgtcagaaaggaacaatggaacggtacgcccttttacctgctcggcgggcacgggcaggaagtccgtaccatcaattttgcgggtcgtccgaaagaggagtttgaaacgacctgccatgatgtcttggacagctacgatgccgtggaaagtatcggggcggtcgtgtcaagactgcgtgaattatctcctgaagaactgcataagcggattgcggaagagatgaagaccggctgtaaatacctgttggtctaccgcagcgaggaggagatgacggccgcactcgacggcaagatatacgccatcagcgatacggacggcaaattcctttgcgacctgtatcagccggattatctccatctggaaaacgggggcgatattgtggacaccgcatccattccggacatgcatttccattccgattgggcaatcgccaaccccacggtacgcgacaaggtgctctcctcccggatggtgattatatatacccacgaaacggtaacgctatgatagagattggcaacaggatagaaacgccggaaggtgtgttctatgaactggaatacggaggggaaggaaacatctacaagaacgaggatgcctttctcaaccgccccgatgaagtgtgctatgtacctgaatacgcggcagaagaccgtgaggactggcgtgtgtcggagagcagtgacggctgtttcacgcataactcactgctcgccctgtgcaagggtaatgaagaggtgtgccaggatctgttttacagccttgaatggacgtacccgaccaccttgctggaagaatgggactcgaacggctatttcgatgagatcgagggctggtatgacagtaacgattaaatggaacggcatatcatggacaggaaatacaaaatcacatactcgggaaaaatcacgggcaagaccccgaactacatattgagcctgcgggcgcatctgaaaggcatcttccctgaaatggaacggtatggtaaggaagaattcgaccacgtgcttcattgcatcagctcgttcattgatgattttaccttcaaggtacgcaattcccgataccggggagacatcctgaaaaggactatcagtaacgactgcctgaaagtgttcaacctgggtgacgagaaagtgatactgaccgtctccttcaccccgctggaaacatgaaaccaacaatatgacagatatggataaaatacagaaagacaatgcggagccgggcaaagccccggacaaaatgagcgccgacaagctgcatctgttcgccacccagtacgcctttatcgacggacggctgcacgaggccgagcaagccatgctgaaattcatgctggagttcctggcacaatatggccgcgtatcactcggccttacagaagaggaggaactcgatgacaacaacttccccgtcacgacaaccttgtacgggaagcacgacacgccccgtatcaagcttaccgatgtctacctgacggatgacggggaatatctccttgctgacggaatagatgcggagaccggggaaaaacgggacggattctatatctacagcgaacaatacgccgatatcttccagttcgtcggccacgcttcggagatgaactgacgaatgaggaacaaccataaaacgaaatatcaatggactgtatcaaagatttacaagacgccatccgcaacattctcgtgaacaacggccttacggaactctgtctgggagagcctgacgaactggacgatcccacctatatcatctggtatgacaggcactgtgagcctcacgaagacccggtattgaaggtttaccttgaaaatgagggcattgccgttgaggtcgaagcccgcagtttcgggaacacgataaccgtctacgattatgacatagaccgtattgaatggtggaaaggcattcatgccaatattctggaagtgctggagcgtgacggcaagcgccggtgtccggcctgtggcaggacggtcaaggggaagcagcggtattgcggtgccggatgccgtgatttcatgactcccggaccgacagtggagcaggtcgcggaaaaagccaaccggaatatccgcaaactggcaagccttgccgccggaaaagacaaggcgtaccggaagcggctgatagagaaatataccgtcggtccgtcataagccggctttgttacactaaaaaatgtatgatattatggcaacaagaaccatttacctgaccgtacggctcgatatcgacaacccgaaggctgatgaaataacggacgaagaggttgacgaaattatcagcgaagtggactatgaattcaaaaattacggggactatgaaatcgacacggaaatctgcgggaaaaatgacgaaggtggtctttagacgctatcccgacggacaggtcatcgccctgttcccggacataccgtggagcggacggcggggtgaaataacctcctacatgcatgtcggccagcatggcgcagccgactatgcgggcgtgatcgccatgacacggccagcccatgaaaaggagtaccgcaacccgctttccgaactgagagccatcggttacgatgacctacacatcatgcggcgtgcaagaccgaaattcataaacagctaaaaacaaatcttatgtctcataaaccgaatgccgttcctgtcttgcaggagggaacggtctatacaattatacttgacaacggacgaaaggtccacgacgtaatctatcatgcctgtgtcgcctccggcaagtcgtatttcgccaaaggcgataagacctatcccgccgaaaaggtgcggaaccattcaatcaccggacatgccgcatcggacggctctagaaggaacggcacacccaatcccgaccgcttcgccatcacggatgaagtgtgcgaggtcgttgatgtagttaccacgccggaaaccaatccggaaatgttccggtgtcgtgtcaaatgcctgatgtattcaggcctgtcacaagccgaggctgagaaagtcatcgcttcaacgccactaaagctggaactcttctacgacgtaggccgtggcagtttcgctattgacgccgaggcagttggcaacacaccgctgtataatccttacacgggaaaggaaatcccggatgaaacctaagccgaactacatcgaatatgagagaactatatatcaagaatctctgcatcgagattacccgacgttgcaacatgcgctgtacccattgcatgcggggagatgccgaatccgtggatatccctttgaaacatataagcaacctgctgcggcatgtcaggcatattcaccatttcaacatcacgggcggcgagccgtcgcttaacgtccgggccatccgccatatcctcgaacgggtacgcgcctacggtattactgtcaatgacttttatatcgtaaccaacggctctgccacatcccgttcggaggaattcatagaagcctgcgccgcactgtacgagtaccaggaggaaaaggaacaggactccggccacatgctcgaaatgagcgacgaccgcttccatgatccggcagagcatgccgccacgctcgcggcactttccccgtatccctttttcggagtccggggacaggccgagcgtatcttccttttccgggaaggccgcagcacggaggggtttccgaaccctgttcatgggatttatcttacggaggagaactacgtttacggcgacctctgtctcaatgctgaaggcatggttctctccaacggggacctgagttatgcccgccaacgggaacatgccctgtgtccctgcgggaaactgatgcaatatctccggatgaccttgaaaaagcgtcaaaaagaaagattgtacgaataaatacacaaatcaaaaaacttatgtcaatcgtatgcagtatctgcggcggcactggagtgaaatgtaccgccgtcatcgacccgaacaccagacagttcctcgaatttacccgcaacgccttgtcggacggccggtgcagccagtgcggcaacgttgccctgaccgaccctgacgaagtaaaagccgggctggacaagctttggacggaatatacggcgcggcatcgtgccgcccccaactacacctgctgcgacattgtccggcatggtgattacgacgggtgtgaaaaggcgtatatccgcatcggaggcccgtcagacgtggtcgagaagtatccggtcgtggccgtgtgccgcgacctcgaagagctcaaatcacttgcgctccctgacccgacgcgagaatttaccctcatgggaattcaagggttcgagttccacgacgtgttggaaaacaagacctacgagatcggggtggacgacctgaaaattcccgtcacgacgaaagaggtgctggacttttacccggcggaacatcggctgaaagaaacggacatcgaacaatatgccgcggcttacacggcccgtatcaaggcgtacagggagtatacccgtcagctcgacgccacactcgtgcggcggcttctcgacaaagagcggctgatgaaagtcggcgagagcgacggtttccgcttgaaactccatttcgactggtttgtcattttaaagcgggagaacgaaaggatgtacgcgcctttcaaatacgctgtaaatgcttattgtctggataatatccaaactttcgaccgtcgttatgtcacgctcgaagatgccttgctccactgcctgaacggtttcaacgagaacgcgaacattcctaaccgttacaagtccatcgggcattacctgtcggggaaatcctgacgacgggcagtgtatcgacgggttaccggaggccacgggtgctttccccttgaccggaataccgtcggaacaagtaacaatgtaaccaaagaataaaaaatatgatgaatgattataaaatcaagaacattctcgaatccctgaaagaggaggtcgagaacgggaaggtatccctgcgggaagctgctgtcgaacttcataaagccggctggacgaatttcatcgacatcgacgccacgaggaacctactgaagacccggaatgtaacggggaacggaaatgtcccgggagtttccgacatgatgggaaaataccgcgagatgaaagcggcgcacccggatgccctgtacattttccgaaacggggaatcttgtgaattgtatgaggatgatgccatcgccgcttccggcattttgggcattgccaccgccgaacgcgtcgacgggcaagggaaaggcgtcaaggaactgcggttttcttttcgtgacctggacgtgtatctccccaaactgatacgcgccggaaaccgggtggctgtctgcgaaccgaatcaaaccggttcgggcaaacgagtttgataaccattaaataacaaatattcaaaacccaaagacacatgataaagataacaacgattttcggcgaggacgccgtacgggaatatgaagagaacaatgaactgccttctgaagaatggctggcggataacgggggcgtcgtggacgagaaagagttcgagactgaggcggagtacaatgcctacatcgccggggtaaacgatgccgacggatggagtgattatcatatcatacgccaccggtcggaagaggcggacacctcgagagaggaaaatctctggctacgtctcggaattagcgtccggggcagccgggaggacatcgaaaggattctaaacggggacaccgaaacccttcggaaactgctcgatgccggacgttatgggattggcggagagacctatgtccctggttcgaccgtcgaggggtacaacgaggaccacgacacggagttcgaggaggaagacgtggagttccatttataataaaaccacaccatctgcaataatgataacagtaaaagttctactcggtaaggatactgtaagcatatacaggaaaaccggggatatctcgtcggtggagagcacggccgaatccgggggatatgtgataacccgacatttcgagaccgaagctgaatacaaagcctacgcaatggctgtggaagacctggacggacatgaagactggcagatgctgactcctgccgttacgccggaagctccgttccgcaaaggggaatttgtccggctgacagacgatgcaattaagcggatacgtgaaagtttcggggacggaccggctgactacagaaaggaaatgattttggaggtgattgcctggtgccgctatgaaggcacatggatcattgaagtccgagatatccgtgaagacgatactcaggagttcgatgccgtttttctgcgccccttgacggcacgggatctcgtggctatttccgcaccccgacacccgctatccactgcgatatatcctattcacatccgataacttaaatgatgcatgatggaaaatatattcatactgcccggaaacgaacaggaactgtttaaccggtatttagataacaacgaatacggccctctgaaagaacggctggaactggtcaggaaagccttgagcaacaagctttccccggatgaacgcaataagcacgggctgaacgtgggtgtgcatgaactgtccatggaacgtaaggaactggaaagaaagatattccaaatggcactcaaatcctttgcagaacgggtttgtgacgagcaacgcgctctttgcgaacaggggttctggcaggcaccgtgcggcaaagaggcggaatatatctcctccgctccggttccggaccttgtaacggacgtgaagcagtacaagaccatttgccgctggtgggagaagctgtccgataccaggaggctgaaggtagcggcgatgtttgcaaacgaactgggaccgatatacgggcacgacaccgaaacgctggaacggatttatagccgctggtttctactctccttagatggcaaacaacgcatctaccattcatggaccacaaacgaaaaacagacttcaccatgccatacaaaagctcgggaataatcatcagcgggacacaatatgaccgcaggcagaagctcactccttttcagaaggctgaaattttccaccgttacatgacagaagctgtcagccagcgccagcttgcccgggaatacggtgtcagccgcaggctgataaccttcattgtgaacccagaaagcgaagagcggaacaaggaactgctgagagagaacaaggcaaaaggcttgtataaatatgaccggaagaaacataccgaaaatatacgcaaccaccgtcgttacaaacagagattatttcaagaaggtaaaatcatactaaaagatggatagacaatgagaatacaggagaaacaaaaagcgttggaacaggaagttatagccaacctgtgtgcgataccgaaaatgccggaaaatatgttgccccatacggtatatgtcgaggaggaaggggaagacgggtatggccacgggataccggtatacaccatgtaccggttggaggagatacgcacggacggaagctgcacgctttacaacgcggaaagccgggagcgtttcacctgccgccacctgcatgagattaacatggactggctggtgacagtctgggaacgttatctggaactctgtgtcgagcaggatatctggaaagggaatgccgttgcattcctgaaagaccgtaccggcaaaccggaagaggaaatcatttcattcgtggaaacctcgtgggacaaatgccaggcttatacagacaacctcaaggcgtttcttggggaagataaagaccgggaaatatggatattctctttcccgctggacgaatttgaacgtgacgttccggccgggaaaatcatcgttgattacgaaaataaccccgcaacgcgggttgagaagatgacaccgctggaatttacggccaacatcaatgatgaatgttttgatgaccggaacaattgggtaagagccattgaacttcccaagcaggaataataaactatttgaatcaataaatatgattacaaaagaaaacattggcaacgagacctttgagtctatgaccatcaatgacacgcctgcattgtttacggatatgcggattgaccggaatgccgttccggagggactgtacgcatacgatatccgggagtcggatgacggggaccgtctggcgaccatcgaaccgacggtgatggtaaatcatggcggaaccatcctgaccaggaaagagtttatcacggaaaaggacggctatgtacagattgacgaatacggtttcgaggcctccatgacactggaagagtggcttgaggaaaacaattaaatgtataaaggatatggatattaaggaactgacagaaaggtatcaggatcgtttcgatgcccattacctgcaagacgataacggaaccggcagaaaaggtcggaaacggaaaaaggaagttgagaccccgaattttctcaaggatgttatccggccgatcctggacactttgccggacttgttgccggagtacgggttcaccaaaactacggatgattacgccatgtacggcgagtattaccgtatcaaggcgggtatcgtcctcgtgggaggtttttccatcgatgaggattttaacctgtacttcacgccattgttccatggcaaagcctgcggtaagagtcacaaaatcgacagcatcggacaactcgttgaaatcatccgcgaacaatttgaaagaagggaggtgaagatgaaaggatagtttcatgcaatagacatgggtcgttccgtaatttattgtatatttgtcagatgaagaaagtctgtatatgtatttcggacgaaagcccggcagttgaacggattacaggcactttcatgtttggctgacatcaaacctaatatatctatttgatatgaaaaaggaagagattattcgccgctgttacggcggcatgaaggaaaggcatggcgtggaaaccatcatccttttccatgtcggagattcattcgaggcgtattttgatgatgccgaaacgattacccggatcacggaagtgccccggttcaagatgacggcggcaggtatacctgccatcaggatttccgacgccgccttggaagaatgtagaaaccggttgctggatgcaggatgcaaggtatgcgtgtccgaggtccggggggtatccggccgccacattctcaaaatcaatgaaacaaatacggaaacgggccgatgaattgatattgatagcggcagcaataggtccttggacactgttggtggtagcggtattaatcatcggaacgctgaaatgctgtctgaccacggactcggacagcattgacgaaagtatcaacaaatcaccggggatagtcgcgcatgtcatggtactggacagtacggataatggttttcgggtggtttatgcgacggctgcgccggtaacggatgaaaggtttgccgagatatgcgacaggccgggtattttggaggggttcgagaacctgaaacggaaagctcccgaacactttggcggcaacctgctggaaaccgacatctgtgacttcgcgttgtacgcctaccggtttcctatcgataaggacgtacggatacacaatatctttgtcgccggtaaagagaaaatggacttctatgtccggaacaacccggacctgcccgggtgcgctacatggatgcaccacggtacggaacaagggaaccaatatctgaatgctgacgatataaatcactgtatacccaacggaaggcggatttaccgttattggaaatgccgttatctactgcaaacttctgatactgacgagcgtttcagtcattttacagaggaggaaaggctgtactgaatgcagccttttctctatatatattacacataaccatctgaaaattaataactaaaacgttttgttggcgtgaaaaattggcatatatttgtatggaaaagtgacccattgaaaacagattgtcaattgaaagcaatagattgaatatgaaagaacagtaatatgacatcggaaaaatcgcaactgaagtttgcgagatcggaagagacgggcgaactgatagggttcgtttcgcgccattccaagacacgtaaattgatgggagtccgtgaagactcaagattcggcaagcagatttgtgtcctttcggaagacctgaaaggaactctcgagccaaacatactatactcggtagagttgaaacccatgcacaaagccaacgggtatgtagtcgttgccgctacccccgtgttatttcaggcgcatgtggaaacagtgatcgtcccgaagacattgtatcaagtaactgtgacgttcggcaacaaaaagattttcttcgacccgaaagacggcaagagcgtaatgagccgcacaatagacggtgtgctggaaatcctcaagggacgcaaggatatcaagtacaaggaaggtgtcatcaccgactatctgaatcaggcgcgtgctctggtacgacgtatggaatccgacgggttcatctatacgggagacagacatcagggaggaattcaatgaaagaaaaaccggtcgtgggtattgcgaccgacggtgcccattctgcaaaagagaggttgacacgcttccgggctgtcgacctctcttcaggaaaagaactcttttccaaagctatcggtaactggacgaacaatatcggggagtttctcggcattgtcgaggcggtcagatatgtcatggaacatccggaaagtccgcgaacaatctactcggacagcattacagccatcacgtggtatcgtaacaaacagacagcctcttcacgcagatgcccggcattgcagaaagcggagatattcctcaaagtgatggaggcaagaatcaaggacatcgaagtgctgcactgggacaaccgcctgtggggtgagattcctgccgacttcggaaacaaataacaacatcaatatggcaaaattaaaatcacagtcacagaaatatgttgagctgaaggaggaagactacctgttgctcatcgagaataccatcaagatggaagccctgaagattgccggtatcgaaaagatgcccatatacaaggctatggaacatatccttgaacacgagcacatcgacctgctcgtcaaacccgtttcaaggagatattcttgatttttttaggtggacaataatacaccccacaagcaaaatcaatgcttatcagtaccaaatgatagtatataataacaattaatgtaaatcaatgcaaatcagatgattaagaaagtggcgcatgtacggaattatctataccatacatgcgccactttgctctatacactttttgatttccttgattgataaaagaaggttcttttccagtgttttacaatccgacttttttatatacttttgtcttcagtatcagttggttattgaaaccctctatgtatgcttataagtagagattagcttttttaagcgaaactaactactggttatcaatcaattatcaaacaaaaaaagtttgccgttaagcgcaccttcttttttttaagcacaaagccccgactttcacaagctggggctttgttattacctaaagattttgtatctttaggcataagattttcactatgacaaagatacattttcgtccttataattccaaccaaacagtgctttttcctcaaagaattgacgaggatattgcagagcatgatccagttcggatggttgacgctctggttgagagcctgaaccttgaaagtttcaggaagttgtataaggaatgcggccgcagcccttaccatcccaggatgatgctcaaggtcattctctatgcctatatgaacaacgtctactcctgccgtaaaattgaaaagctccttcatcgtgacatccattatatctggcttgccggatatgagaaacctgatttcattaccatcaaccgtttccgcaaccgggtgaaaaaggaaatcaacgaggtatttacccaaaccgtactccttctctcttccaaaggcttcatcaggctgaatgtggaatacattgacgggacaaagattgagtccaaagccaataagtatactttcgtctggcgaaaaacggttgagcggaactgtgaacgcctgatgaagaagatacatgtcctgttagggcagatagacgatgtcatcgcccaggagaactcatcggaaagcaatgaggagattgagttcactccggccatgctgactgaaatggctggagaattgcggaaagcacttgaacaggttcctgagccctccacgaaagaggaaaagactgcgttgaaaaagaaacgcaaacagctgaaggaactggaagaacacagggacaagctgcaggaatacgacaaccgtctgaacacgctacaggacaggaactcctattccaaaacggacaaggacgctactttcatgagaatgaaggaggatgccatgcgtaacggccagacaaagcccggttacaacctccagatcggcaccgagaaccagttcattaccgattttgcactcttcccgaaccctacggatacactgaccatgatacctttcctgcaatccttctcaagcagatatgacaggttggcccatacggtggtggccgattccggctacggttctgaggagaattaccgcttcatgtcagaaaacggtatggcgggctacgtcaaatacaactacttccacatggaacagcggccgagattcaaaccggacccgttcagggcggaaaacttctactacaatgaagaacaagacttttgtatctgccccatgggacagaagatgcaaaggatagggactagacatgtgaaaacagcatccggatatgtcagcgaaaatgccacgtacagagccatcagatgtgaaggctgtccgctaagatgccgatgttttaaagcaaaggggaacagaacgatagagttgaatcacagactcagaaaatacaagcaaaaagccaaagagctgctctgctcagaggaaggactgaaacacagaggacagagatgcatagaaccggaagccgtgttcggacaaatgaaaaacaatatgaattacaaacgtttccgccattttggaaaggataaggtcttcatggacttttccttctttgccattgccttcaatataaaaaagatgtgtgcaaaaatgactaaagaaggtatggattggctgattagaccgttttatgagcttacagttgctctatttagatgttgcgaacacataaaccaaagaaatcctcaaaatatcgcagcttaaagaaaatgaaccgatttttatagtcaatgaaaaaaaaagaaggcgcatcgtgtattacgacacaccttcatattctgattaccgaaacgttataatactactcacacatgatgaaacatcttttttcttttctgataatagtttctttgctgttatttggttgccgttcaaaaacacaaagtaattttcagcctgaactttctgaacaagcggaggaaagctattctttacctgaagaatacgctgaagaagtgattgttacaggcaaggtgctgaaccgggatttttatcctaatgaaaaagatttgactcttattattcctttttttagaaaaatggagaatcagtactgtgcacctatccaaaaggatggatcattctctttccgttttcctatttttgcaaaaataagggagatttctattcgtaattatgccgaacatttgtatgtgcatccgggggatagtgtatacgtagagattgattttaaggatatgtttcatcccaaagtaacgggtgatgctgaaaaattaaaccaagaaatattggcttttactgagaatgcttattactatatacagaattatagtataggatctaatttgaataataatgattttgaaacagaacttaaaagggagtataatcttcgtttggaacgtaggcaagagtatatacaaaaatataagccgtcagaagaagttgaatttctcacagaagaactattgaaacaggattattattatgctttgctactttatgcttctcacatccaagatgaaactggtaaggagttggagcgctatcatgcgttgttgcctgaaattaacgggctttaccataaaggcatactatcagcacgtttatttgatattgctgaaagtgtagaaaactatattttatttggaatggctttgaaaaataggaaatatccgaagatagaggatatgatgtctctaattggggagaatacattgaatcagtatttgtatacaaagatgatggctaattgtttgacggctaatgatacacttgctttagcaaaacgacacgcacagtttgattcaatagtgaagatgccgcatttacgtgcacagattacccaaatatataatcgaactaagtcatatttggaaaatcctcaatcggtttccgataatttattgtatggggtatttcatgaaaatgcaagtcaaaaaacgtctatgtcatttatggaacctatttatgaaatgctcgagaaagatcgtggaaaagtgatctattttgatttttgggttaagtggtgccctccttgtttaacggagatggaaccgttgaagcagttacgcagtaagtattccacaaaagatttggtcatatattctatatgtggcagcgaaccgaaagaggagtgggaggagtgcctggataagtattcattgaggaaccggggaattgaatgtatttatgcaaatgatttttttggaaaagaaaattatcagaagatttgtaaccaatggaatgtgcatgatatgccatattatatcttgataaacagaaaaggacagattattgattttggtagttcggcacgtccgagtaatccgaatttgcgatctagaattgaggaggcggttaaaaatataaaataactttttatttattttactcagaagtagaggatagtgagtacaaaacagccggatttccgtctttattttagtaaaaatatagattggaatggaaagccgactgaaacatcgaatatttgtattttctttattggcatggactgttatatgtccttccggtactcaacaaacacattcgcttcacgaacaattcttgaatccgtccgatgaatcccgatccggtggaactttcaccggaagtgaaacagaagattaatgaattaaaagaggcaggcgtgttggttcccgttattccatctaaggaagacgatttatttttattgctaatcaaaggattgatgcagtctttcacagtagcttattttttagctctgtgaaaggctgtgtttttgttttcggatatttaatgagaaaatattcaagaataaggtttctgctatgactcttttttgtacttttgcagccgatttaaaaataccacatgcatgaagacaagcgaatctttattatcaaaaggaaaattcattgccgaatattctgcccacctaatgggagccggagtacatacttcgcgggttgtccgtaattccaaacgtatcggtgaggctttcgggctagacgtaaaattaggagtatttcataaaaacatcattcttacgattattgacaaacaaaccaatgaggcttgcaacgaggttatagacattcctgcacatcctattagttttgaacataactcggaattaagtgcattgagttgggaagccgtggacaatcgcctctcgttggaagaactgacggaaaaatacaggaaaatagtttccgctccgatgatacatcctctttttgtattattgctggtaggatttgccaatgcttctttctgtaaactgttcggaggggatttgatttctatgggcattgttttctcagccacaattacaggattttacctgaaacaacagatgcagaaaaagaaaatcaatcattatataacatttattgtttcggcgttcgtggcttccctatgtgcatccacagctttgatatttgatacgacttccgaaatagcactggcaaccagcgtactgtatctcgttccgggagtgcctttgattaatggtgtgattgatgtggtagaaggatatgtcctgaccggatttgcccgcttgacggaggcgtccttgctgattgtcagcattgcgatcggcctttcctttacattattaatggtaaaaaacagcttaatttgatatggtagcactcgatattctttccgatggattttttgcagcagtggcgggtataggcttcggagctatttccgacccacctttgcgtgcatttaaaatgattgcgattttagcggcattaggacacgcatgtcgtttttgcctgatgacttatttaggggtagatattgctaccgcttctttatttgccggtttggtaataggttttggtagtctatggctgggaaaaagggtctattgcccaatgacggtactctatattccggcattgcttccgatgattccgggcaagtttgcctataatatggtattttcactgattatgtgtttacagaatatgaatgacccggagcaactggataaattcatgggtatgtttttctccaatagcttgatagccagcactgtaatattcatgttggcggtaggagccacattcccgatgttcctgtttccacaccgggctttttctttaacaagacattaattaaactacttttatggagattttttggagaacaatcgcatattataactcagccacctggcttttgcagatagttattattcttattggtatcgtgctgacagcattgctcatctgccggccacgtccgtgggtgaaaatgggaatgaagttctacatgatagggttgtattcatggatttcagttatctattattatatttattgtgaggaacgcagctataatggagtaatggctatgttttggggagtaatggctattatctggatttgggatactattacgggatatacaacttttgaacgtacacataagtatgatatcttatcgtatatcttgttggcaatgccttttatatacccactggtttcgttggcccgcggacttagtttcccggaaatgacctctccggtaatgccctgttccgtggtggtatttacaatcggactactattgctgtttgctcataaagtgaatatgtttctggtgctttttctttgccactggtcattgataggattatccaaaacttatttcttccagattccggaagactttttgttggcaagtgcaaccattcccggcttgtatcttttcttcagagagtatttcctgaataacctgcatgccgatacgaagccgaaagcaaaatatattaattggttattaataactgtctgtatcggattggctatattactgactactacaatgtttctggaattagtacccaaaaactaatctgaaacagagagaatagttttttctagaaataaaaaatcgctttttataactattaaagttatagaaggcgatttttgcatacctgcctattgaatggcatagaatattcgaagagcatattgcatgacaacgtcaggcagccatttcttactcttagcgaatgtgacttgtatccatggtccgactttcgtacggaagggaggatttttgcgtgctactattttacagattgcatgccccaacttcttcgggtgacatccgttacgttcttccttttctataatttccaatgatttcaggaaactctccttgtaatcggtatttactcttgttgcttccgaaatattccggttatctgtaaatccggtattgaaatctcccggttctacaatacaaacttttatatgaaacggatgaacttccaaggctaaagcctcactatatccttcgaccgcaaatttagaagcggaataaaatccctgataggggatacccattactccaccgatagaactgatattgatgatttttcctcttcgtgccttgcgcatataaggcagcaccactttgcacatgttcactacgccgaagaaattagtattcatctgcccggatatttcatcttctgttgcgagttccaaagcgccgccgatacccattccggcattattaatcaatacgtcaatccgtccttgttctgatataatctgtccgacagcttcgtggatagaaagaatattagtgacatcggcaacaagcatttttacattgttcatgtttccggaaggctttctacttgttccgtaaacaatgtgcccctgttcagataacatttgcgctgtgattttcccgaacccggaagatgctccggtgataagtatgacttgtggttgcatgttttttcagaaagtgatataacggccaattattactcctctaatatagcagtcagttctgctctccaatcagttctgttccggggttggaaagtttcgaatcccagctctttgcccatgtggatatttgaagttccgtcatctacaaataaagtttcggaaggaattatattacaatcctttatcataaagtcgaatatttccggtgcaggttttgtatgtcctacctgataagatagatacagcttgtcacaataatcattcaatggcttcttccttgaggaaaattcggggctacaagcccatgacatgacaaaaggattggtattactaagaatatatacatgataagacttccgtaattccaacatataatcaagtttgcgcaaatctacttcgttgaagaagcccagccatgcctgtttggtttcttccatagtaagctctcgtccgcataaatctcccagttgttttctaaattcatcagcgctaagtttgccttcctccaattcctgaaatattccggtttgatgatatttatccaaccgactgtctgcatccgtcaatcccagtttgataaatgcctgaacggctttatcacggtcaatgtctacaataactccaccaaaatcgaatacaatgttcttaatcatgatatattttttattgctacaaagatacagcttatcttcctaattaactgcttgctgttccttgatatttatcaagaaaagtatagaaagtaaatttagacgaaagaataacagttatcagacgattaattttatactatatcaagtttagagtttactaaaagaaggaagaaatattcgctactctagcaataatcttataaatttgtcgcatatttgtatgtagagattaaaaattgagactatgagtaatcttcgaattttattgtatgtatttgtcctctctttggccgcatgtcatccggaggggactaatgtgaaacaaggattagataaagctgctcaattaatggagcaagatccggatacggcatccattattcttgaaactattcaaatgaaccaaatgaatgaggcgcaacttgcagaatacaatttgctttgtactcaattcaatgaagataagaatatacctcattcttctgatcatcagattcgtcaggccgtgtcttattatgagcaatacggaaatgaaattcagaagtcaaaagcctattattatctggcatgtgtagaaagtgatttgaatcaggagaaagacgctgaaactcatttcaaagaagcaataagactagctgcgcaaacagaagaatatgaacaaatgactaagatttgcaggagatgtagtctttattatcagaaatatggcaactttgacgaagcgctggaaatggaaagaaaagcgtatgccagccaattgatgttgattgacagtaaagaccgttctaccgtgattctgtcttccgctttgggagtgttcggtgccatgtccctcttgcttggattgctatggaagaaacatctgtctgtacactcgcaactggacacctttaaggaagaaatgcagatgaaagaggttgaatctgacaaattggcgatgcaatgtaattatctcgaagaaaagtatcaatcccttcaacagcatatttatgaaaattctccggttatcttgaaagtccgtcagttgaaggaacgaactgctttgtctcccaaaataccgtctttttcagaaagagactggacggaacttttacgacttcaggaaaacgtttatggccttgtatccaaattgaaagagataagtccgaaacttacagaagaagatttgagggtatgtgcttttttacgcgaaggtgttcagcctacttgttttgcagatttaatgaaactgactgttgagactctgacccggagaatctccaggataaaaacggagaaattaatgctggcaaactctaaagaatcgttggaggatattgtgaaatcattatagtctgcatttgtctgtgcttgtttatgtgacgctgttgaatatcaactgattataagtataaagtgtccgtattcgtccgataagaatcttctcttttatatgcttgttctataactttgcaaacaaaaaagttacagagcaatgaacaacttattatttaaaaaatggaatgattttagtgggtggattgtttttctaatagcagcttttgtatatggaatgacgattgaacctactgctagtttttgggattgtcccgaatttatttcgtgtgccgaaaagttacaagtagggcatccaccgggtgcacctttctatatgctcgtaggaaacctgtttacccagtttgcttccgaggcatcgcaagtgtcttggctggtgaattttctgaatgcgttgttgagtgccggttgcatcctgtttcttttttggagcatcacccggttagtaagatccctgatagtaaatgaagagcagaatttatcaacgatagatgttatcgtcattctgggggcgggatttgtcggagccttggcatatacattcagtgatacattttggttcagtgcggtagaaggtgaagtttatgctttctcttcttttcttacggcattggtcttctggatgattcttcgctggcaagatgaatcggattcagtatatggtgaccgttggattatcctgatagcttatattatcgggctgtcaattggagtgcatttgcttaatctgctctgcatcccggccattgtgctggttttctattatcagaagtatcatgcaatatcgtttaaaggagtagctgctgcaattgtcatatccggtcttcttatcgtatttatcctttttgtttatattcctggcatagctgatatgggagggtggttcgagctgctctttgtcaatgtgttcggacttcctttccatacggggctgatcgtctttttagctttaacatttctcgtattggtcggagccatttatcgtttccaaaaacgtatgttgcatacttctttatggtgcttgcttatgctcaccgtaggctataccacctatgcggtgatactgattcgtgctaacgctaatactccgcttaatgagaatgcgccggataacatttttacacttaaaagttatctgaatcgcgagcagtatgaaagtgctcctctgctttatggaaaaacttatgcatccgaaccggaatatgtgcctgaaggtgactattacagagtaaaaacgacaaagggaagtgctgtatatcgtccggataaggaaaatggtaaatataaaataatccggtataaagaagatgtgtgctatactcagaatatgttgtttccccgaatgtggaatgagcgaatggctgcttcatacaaaaactggacgggaggaagcgaagcggctcccacgcaaaaagaaaacctcacttatttcattacctatcagctcaattatatgtattggcgctatttcttatggaactttgtaggacggcagaacgatgtgcaagggagtggcgaaccggaacatgggaactggataacgggaatttcctggttagataatttaagattaggtgaccaaagttttttaccggaatctttacgtcagaacaaagggcacaatgtgttttacggactgccgctattattaggactgttcggaatctattggcaatggaaccgcagtaagaaaggcaaacagcagtttagtgtactgttcttccttttctttatgacgggactggctattgtactttatctgaatcaaactcccggtcagccgcgtgaacgggattacgcatacgccggttcgttctatgcttttgctatctggatagggataggagcggcaggattatgtgatatgcttcgccggaaaacaacttcgacggtgcaagtcagtgtgttaatgacaatctgtttattgattccggtgcaaatggcgagccagacctgggatgaccatgaccggagcgcccgttttacttgtcgcgactttggggctaactatctgatgactcttcccgatgaaggaaatccgattattttttgtaacggagataacgatacgttcccgctatggtataatcaggatacggaagaagtgcgcagggatgcacgtgtttgtaacctaagttatgcgcagaccgattggtatatttatcaacagcaatgtccgttgtataatgctcccggactgcctataagctggaataaaaatcaatatcaggaaggaaccaacgaatatgtggccgtacgtccggaactgaaaaaacaaattgaggaactgtaccggaagcacccggaggaagctcgtgacagcttcggagaagacccgtttgaggtaaaaaatatcttgaaatattgggtgttctcagagaaaccggagtttcacgtaatccctacggatacgataaatatccacattgataaggacgcgctgctccgttcgggaatcatgctccccaaaacaatccgacatttgaaaggggaggacttgaaggatgccataccggacaaactgtatattcctttaacggatatacgtatgttgactaaagtcgatttactcatgctggaaatgcttgccaactgtaattgggaacgtccgctttatcttgcaatttccgtaggaagtgtcagtaaactgaagtttgacaattactttgtacaggaaggattagcattccgctttacaccttttgactataagaagtggggagatgtcggtgaaaacagactttatgcagtagatgtggaaaggctttatgacaacgttatgaatagatataaatatggtggactggatactccggggctctatctggatgaaacaacactacgcacgtgttggtatcatcgcaggctttttgcgcaacttgccaaagaactgatagcgcaaggagataatgagcgtgcaaagaaagtactcgcttatgcggaacaggttattccgggatataatgttcccgaaacacatgaaagcggttcttatgatatagcaacggcctatgctgctttgggtgaaaaaacgaaagcagtgactctggctgtacatttgatagctgaagcggaagattatattaactgggctttttcattaaaaggaaaccgtatagaaatggttcgcaatgattgtatctataaattctggcaatggaaccaatataatgaactcttgaagaagatagacggagaaaaatataaagagagcaaccggcggtttgaggaaaaatatgcgctattcgctccaactatgaattacaaaaactaaaacggaagaagaatatgaaatcaaaaataatgaaacagaaagagacagaaacagtatttagcagaagaaattatataattctgctaattggttcggtagtaataatagtaggttatctattcatgagcggtgaggggagtacccctgccgcctacaaccctgatatattcagcggattgcgtataaaggtagcacccgtagtatgtctgacaggatatttgataaatatattcggtattctataccgccccaggcggagttaattatctcaatgttttccatgcatacatcatcaccactatgaatgaaagcaacggaacgatgaatgagaaggacattgtagtctggtctgctacatatcccatgagcaaggggccgacagcccctccaatgggagacatcattaaataagaggatgcacgtttggtatgattgcccagtccccgtaatgaaagtgcaaaaatagtaggaaacataattgcttcaaaagcgtaacccaagaaaagagctatcagtgatatgatccccagattcagtacaattaaagaacttgttacgactgtaccgacagcacaaaagaacaatactttctctgcccgtatctgccgcatcacccaactaccggcaaatcgtccgcacataaatagccccagaccaccgaacgaaagaatcacagaagcatcgcgggcgttcatccagccgtcatctaccacataattaataaaaaaactattaatagagatttctgcaatttcataacagaataaagctgcgataccaaaaataaaaagcttgtgtgaccagagtccctgtgcctgcccctgtttatccgtgtcttcttcatgggtaatctccggcaaacggactttgttaaatactaaagcaactgccagtacaatgattcccattaatgtatatggcaatgagatattcgaactaccttcttccgaaaacaataataaacctcctataagcggcccgcagatacaacccaatccgttaaatgattgtgccagatttaatcggctggcggcagtttcccgttcacctaattccgtcatataaggattggcggctgtttccaaaaataccaaaccgcaggcaatgacaaacagggagaaaaggaagaactgaaacgacatccagtattcaccgggaataaaaagcagcgaaccgataccatagagcaacaaaccgaatactactcctttgcgatagccatatttattgataaacagtcctgctgggatagccatgacgaaatatcccagataaaacatgacttgtacccatgccgaatgagcacggcttatattcatcacatcctgaaaatgcttgtttaacacatctaaaatagcatgtgcaaatccccatagaaagaaaagggaagtgaccagaataaaaggaatctgatattccttcttgactaatttctgcatagtgagtttattaaaaaagagcgttctttgccttcggggcacaaagataggcaaaatgacgataagatgttcatatcatgatatcgcttttacaaaaaagaataataggtaacaaaaaaagatttagcccgtctataaacagtgattctgtaatattggtataataatctgtaatctatctactttgcgaatatttaaaatcgagtatatttgctgcataaattattagtataaataaagtatatgatgctaaaaaaagtaatgagtgcttgattaatctgtaatatagatataaactactataaaaagaaaacaatttaattatgttacgtactatcagacttacagccgcgattgtgtgttttacacttgtcaccctgttatttctcgactttacagggacattgcatacatggttcggatggctggcaaaaattcaattcctgccggctgtattagccttgaatataggtgtggtattattccttatcatacttacaatcttgttcgggcgtatttattgttcggtcatttgtcctttgggagtatttcaggatgctatttcgtgggtatccggcaaacgtaaaaagaatcgtttccgttattctccggctatgaaatggctccgctatggcgttttagcagtgtttattattgcaatgattgtaggcttgaatgctttggcaattctgatagcaccttatagcgcgtatgggcgaatggtctctgctttgttcgctccggtttggcagtggggaaacaaccttctggcatactttgccgaacgggccggcagttatgctttttatgaagtggacgtatggataaaaagtttttctactttggttattgccgtggttactctaattgtacttattatattggcatggcgtaatggacggacttactgtaatacgatttgtccggtaggtacggtattaggattcatatcccgatattctatcttcaaaccggtgattgatacttccaaatgtaacggatgcggattatgtgcacgtaattgtaaggcgtcctgtattgatgcgaaagcgcataaaatagattatagccgttgcgtcgtttgtatgaactgcttgggaaaatgtaagaaaggggctattaaatacacaagacgtattcccgaaatagaagcggaacctgagatgataactacctccaaagctaaatccgttactacggagcaagtagacaatgctcgccgcagttttctttctgcatcggctatcttcgcaaccaccgccgcactaaaagcacaggaaaagaaagtggacggcggactggcaaccattgaagacaagaagattccccatcgggaaaatcccattttacctcccggttcattaagtgcgcgcaattttgcacagcattgcacagcctgtcaattatgtgtttcggtttgtcctaatcaggtactccgcccttctggcaatttgttgactttgatgcagccggaaatgtcttatgaacgtggctattgtcgtcctgaatgtgcaaaatgcgcggaggtctgtcctacggacgctattcatctgaccagccttgctgataagtctgccattcaaatcggccatgccgtatggattaaagaaaactgcgtaccgttgaccgatggagttgaatgtggtaactgtgcgcgtcattgtccgaccggtgctatccaaatggtagtttccgatccggatatggcggattctcccaaaattccggttgtgaatgcggaaaaatgtattggctgcggagcttgtgagaatctatgtccgtcccgtcctttcagtgctatttatgtgacaggacatcagatgcatagaattatataatctaaattgagatgagattatggaagaaaagaataaaaagagcataaacagaagagattttattaaaattgtaggtatcagtgcagctacatcaacagccatattatacggatgttcttctaaaggtacttcctcatcaagtagtgtatcgggagaaggggaaatacctactgacaaaatgacctaccgtacttcgccaacaacaggtgaccgtgtttcacttttgggatacggttgtatgcgttggcctcttaagccatctcccgacggtaacggtgaggtaatcgaccaagacgcggtgaatggattagtagattatgctattgctcacggagtaaactatttcgatacatctccggcttatgtgcaaggtttttctgaaaaggcaacaggcattgcattaagccgccacccgcgtgacaaatattttattgccaccaaactgtccaatttctcgccggacacatggtctcgtgaggcttcacttagaatgtatcataaatcatttacagagcttcaagtagattatattgactatatgttgcttcatggtatcggtatgggaggaatggatgcccttaaaggacggtatctggacaatggtatgctcgacttcctgattaaagagcgtgaagcgggacgtatccggaatctcggattttcttatcatggggatattgaagtttatgattatctcctctcccggcatgatgaaataaagtgggactttgtgcagatacagctaaactatgttgactggaaacatgccaaagagacaaatacccgaaataccgacgcagaatatctgtacggtgaattggctaaaagaggaatcccttctattattatggagccgttgttgggcggacgtctgtctaagttgaatgataatttagtagcacgactcaaacagcgccgtcctgaaaacagtgttgcatcgtgggcattccgttttgccggttcttttccggatatattgaccgtactaagcggtatgacttatatggaacatttacaagataatctccgtacctattcaccattggaaccacttactgatgaagaaaaagaatttcttgaagaaacggcgcaattaatgttgaaataccctaccattccttgcaatgactgtaaatattgtatgccctgtccgtatgggttggatattccggctatactgttacattataatcgttgtgtcaacgagggcaatgtccctgaaaacgggcaagatgaaaattatgcgaaagcacgccgggcatttcttatcggttatgatcgcagcgtgcccaaactccgacaggccagtcattgtatcggatgtaatcagtgtgtgtcacattgtccgcagaatattgatataccgaaagaattgcatcggatagaccaatttgtagaacaactgaaacaagggactttataatggaagaattaatcaatctactacatacaggaggatattcctgtgtgatagccaacgaaggaaagattcgcacttttacccaacgcggagtagccgatttatacgatttgctgacccgggagccggagttcctgaaaggagctctgattgctgataaagtagttgggaaaggagctgccgccctcatgattttaggtggtataaaagagttatatacagatgttgtcagttcaaacgctatggacttgtttcagacatcagatgtaaaagtagactttgtacaggaagtgccctttatatggaatcgcgaccatacaggctggtgtcccgtagaaactatgtgcagtgaagaggaatcggccgaagctattttgcagctgattcgtggctttctcgaaagaatcaaaaataaagagtaaaaatacagactaaagtatgagaaagaatacagctcgtttatttctattcagtagtctgttgtccatttcgggaatggcagaaaacagaaaagacagtacgcaagtaggacgaaattatgttattgatgaggtcgtagttaccggaacacgcaatgaaacggatatacgtcatttgcctatgactatttccattgtcaatagacaacagatagaaaaaaggtatgaaccttccttgttgccattattgaccgaacaagtaccggggttgtttactaccagtcgtggtattatgggatatggtgtgtctacaggtgcagcaggtggcatgagtttacgggggattggtggtagtccgacagcggggctattagtcttaattgatggtcacccgcaatatatggggctaatgggacatccgatagcagatgcctaccaatccatgctggcagaaagggtagaggttctacgtggtcctgcatctgtcctttatggttcgaatgcaatgggcggagttatcaatattgttacccgtaaacaacaggaagaaggggtgaagaacaatatgcaagtaggttatggttcttataatactttgcagacagaattttcaaatcgggtgaagaaagggtgtttcagcagtgtcgtgacaggttcatacaaccggacggatggacatcgtcccgatatggagttcgagcaatatggaggatatgccaaactaggctatgactttagtactttctggaaagtatggggagatataaatgtaacgcatttcaatgcttccaatccaggaacggttcaaactccgcttttcgacaatgattcacgcatcactcgcggcatgacttcgtttgctttagagaatcattatgaaaagacttcaggtaccttgagctttttctacaactggggacggcataagataaacgacggatataaaactggagaagaaccacaaaagtcacattttaattccaaagaccggatgctgggtatatcgtggtatcagagtgccactcttttcacgggtaaccgtgtgacaacaggatttgattatcaacatttcggaggggaatcttggaataaagttctggctacgggcgaacgcaaatcgggagtagataagcaaatggatgaatttgcagggtatattgactttcgtcaggatataaatagctggttatctctggatgcaggagtccgtgtagatcatcattctcatgtcggtacagaatggattccacaaggaggtctggcatttcattttccgaaaaatacggaagtaaaagcaatggtaagtaaaggctatcgcaatccgactatccgggaaatgtatatgtttgctcctgccaatcccgagttggagcctgaaaagatgattaattatgagttctcgtactctcaatgtttattggaaggagcattgtcttacggagtgaacctttactacatcaatggcgacaatattattatgagtaatggattgacgcctcctttgaatatcaactccggagaaattgaaaactggggcattgaaaccaatgtcggctatcgtattaactctcattggaacatctatgccaattatagttggctgcacatggaaaatcccgttctagccgctcctgaacataaactatatgcaggtatggactatacctccggtcgttggaatatttcaacaggctttcaatatgtgagcggactttattcctccgttacaaaggggcatgagcaacaagaaaattttgttctatggaatcttcgaggcaactatcgtatatgtcattttgcagatatctttgtcaaaggagagaatttgttagcgcaacgatatgaaataaatgcaggctatcctatgccaaaagcaacatttatgggtggcattaatgtgaatttttaaaataatgaagatatggaaacaacaaccgtgaaactctattcgttggattacagcaacgtaaagacctattgggcagcctcgttattcatcattggtaacatcctttttcccaaactctttcatctcattccacaaggaggaataacttggctgccaatctacttctttacactgattggggcttataaatatggttggaaagtcggtttactgactgccgtcttatcaccggctataaattctctactgtttagtatgccggctcccgccacattacctgtaattttattgaaatccgtattattggctattgctgccggatggacagcgcaacacttcagacgtatttctgtcataatgctgataggggtagtatttgcctatcaggtagcaggtacattaggagaatggatatacattggtaatttttataatgctatccaggatttccgcattggaattcccgggatgtgtctgcaagtattcgggggttatcttttcattaagtatctgatatgtaaataactcattcgaagaataattaaaggaggtaactttttcctaaaacgagaaagttacctcctttttagtcatcggataaattgtcttccgttataataggagaggagttacttccttcttttgcatatttagtcggactcatcttataatgtttcttgaatacctcccggaagtatttgctttcagagaagccggtcatatctgagatttcggcaatagtatgtccaccttcttttaatagttgtgtagcacgtttcaaacgggtaattcgaatcagatctgtcggagactgtcctgtcaacgccttcagtttacaatagaaactagtacggctcatgtgatgcaactcacaaagtacatcgacagagaaacctgtattatccatattttcctcaatacttttctttacagcggatataaactgccaatcaagactggtggttccgtttgctgacggtatcataggttccgaatcaatatccagattagcatatctgctacgtaacaacgccctgttagccaataagtttgcaatacttgctttcaatattctcacgttgaaaggtttgacaatatatgcgtctgcaccgattgacatcccgtcaagaatgttgttttcatctcccaaagctgtaagcagcagtaccggaatatgtgatgtctcaatatcattttttatagcgacacatagctcatcgcctctcatctccggcatcatgatatctgaaagaataaggtcgggccagaattcttttgcaataattagtgcttcccgcccatttccgcaagcttgtacgtgatacatcgaagataatgaactgaccagataggaacgcaattcatcattgtcttctacaattagaatacgttgtgagtttgttgtttctacggtattcaccggtgtggcagaaatattgggaaccgtcagttcaggagtctgttccaacggtttggctggtggaatcaaacccgcattctgaaaatgcttattacttttcgggaaaacaatcctgacagtagttccttgatgttctatactttccacattaatcttaccaccatgaagacgaactaattttcctaccagcattagcccgatgccactacccgtaactttggaattaatagcattactggctcggaaatggagcttgaacaacttactctgctcactggatggaattccaatgcccgtatcctcaattattactttccaagaatcattactttcggatactgaaacacttactttaccattctccggagtgtattttagtgaatttgataaaatgttttttagaattgaatccattttctccttatcaaaccacacattcaaataactgaaagaactctcataggtgaagtcaatatgtttgatagcagcataggaagaaaaagtttcatatacttcgtgcatataggtgttcaactcatattcggaaacacacaattctgaagaatacacatccgcacgttcaaaattaataagattgttggttaaccgtaaaagagtccccacatttcttaatgcagtatttgcacgagttattccgttggcggataaaggttcttcatccagcagttcctctaaaggagctttaatcagagttagcggagtacgtatgtcatgagctgtattaatgaagaaactcgtcttttcatctgaaattttcttttgctttcttaaattcataacccgtagaataaagatgaatcccaaaattactaataacacgtaacaagtgattgcccaccaactagaccaaaaagggtgcgtaacgacaattctcattgtacgctcttcaaaaacaatatcatgttcttcccttgaaatggcacgtacataaagagtatattttcccggtggcaaattggtataacgaatcagattggctgctcccggttcggtccatttttcgaagaaaccatccaacttccatgcatagagagcatttcccggagaatcatagttgatagtggaaactctgaatgagaatgtattctgattatatttcagctccaacacatccgtatcattaatacttttctccaatggagaatcttcttctcccggatatacaggctggtatgaaatattcaaatcgctgaatatcatctttgtatatacataatcggggaactttacattttggggaagttcgatagctccgtccgtactaccaaatacaaagttcttatttttacgtaatactccggatgaagcattgaaataggcaggcaataatccttctcctttggtccagttatggaatattttttccttcgtatgaaaactggtgaccccattttccgtactcatcatgattcgtccgtcaacttcaggcaaaatagtaaaaatgctgttggaaacaagtgcggaatttttagctatataatgctcaaatttcttattttgtgcatcatatataaatactcccgctccattcgtaccaacatatagcagtccgttatctgcttgataaagcgtattgatgtaggtcgatccggcttccaacttaatatattcgtatttcccggagtctctattcagcaaatacaatcccattgccgttccgatccacatattatgactatctttttcggcaatagctgtaatagaacttactcccggatataggcgaacactgttagttgccaaatcaaagcattttaaattatagtatcctcccgaccatatatgtccttttgagtcttttatcatatcacggatatatttatccgggcgcatatttatgtgtgaaagtaaataaggagagaaatattccacggataaatctgctttatttatcttgtatataccggaagtatagcctcctgcccagataatgccgggtgaaacctcacataaagttatgaatatatgatttttgtcttttagctgatgattgaaagaactcagaaaagaatgccattctcccgttcccgaattgtaaagactaatgccgttactcgtaccaaaccataaatctccatcactgtcttcaatgacagcgtgcacctggtcattgacaatggactgcttgttgcccatagagtgtttcatccaatgatagttttcataacgataatctataactgtaattcctgtgggataattggcaagccatattcgttttgattcatcaacaaatacgtcattgatgttgtcaccattcatttcattatagctctggtaatttgctgatatgtaacgttctaatatgcatttgttcatgtctagcttatatacgcccatgccttcggttgccactaatagttctgtttcatttaatggtctgatacgggttatattcacatcactaagatctgcttcaggccggataatctcttgggaaagcatatcatatacaaaaatacccctctcaaatgagccgatatataattttttttgctgttgctggaaatacaacacacttacttgcgtatgaaaataatcaagcgtctcggtagggataatttgtaaagcaccgttttccagtttagcatacctcacgcctgtttctgttgctataaagaaatgattgtcatctatctgctctatggctgtaatattgctgtgtagtatattagggaactgaaatgtatgagcatttttgatattgtataatacaatagaatcattgcagcataaccaaatattattgttgtggtctacataaccataattaatcgttttcgatatatccggtagtttatatcctatcgtaaaacgatcatattgcttttcatattgaaagagacgtccttttctgccaatcacccataaacctgcctccggagtagcatataaccaaccgaggtgtatttgggaagcaacggaattatcatctttgttcagtttataatgctttatatctttaccattataacgatccattccttcattggtgagaaaccacatatagccttgatcatctttctgaatgttgaatatccttcgattacttaatccattttctattcctatatatttgtaagtttgtgccgtgaccagaataggaaacaaaaggaaaatatatacaatgtatttcatataatcatttatttttaaattgtttttaactgctatttaaaaataatagtttacgaaactatacaaaagcgatgagaaaaacaaaaaaatgtagcacattcttatagaaaactttcgtttggaaattttttgtttcctaagttgattatttacttaacgaagttgacttttctgaagctttttttggtatacccatatacttaatataaaataaacgagtacttgaatccataaagtaatatattctggtcgtatatcagccatacttgctcccattgaatttaattgtacaaaagcaagtgttgcaggagctgccggaagaatataatgtgccgctttccaataccaaggcattaactccattgggtaagaaactccggaaaggaaaatcaatccgactgaaaagaaagctatcattaacaaaggtgcttccgaatcggtaaaataacgggaagcagccagtccgaggaaagaagtagctatcaggtaaggaatcattaatagcacaatatacagaccatttccaatattgggaatactgaaaaaataagggagcaatcctaataagaagaaagaaaagatagcatacaatccgcaatatacaaatgtctttcctgctacaatgcgtatggcggctgcccaagtatggccgaaaggagcgtaagtacggattccgtctgaactatattcttctccggtcaccataccgataaccattagcaaagtttgaaatataataatcatcataacggcaggaatcaggtaggagccatatccttccgtataattataaagtgcggtcccttctacattgatcggttttgccatagttacagccaataatccctgtgggggcagaaacacagcttcatcgggtcggtatttatcgttaatcgccaacatcacacgtgacgaagctccttgtaaggcttcaaagtacaaaaatgcatcagttgttgcataaagggaaaaaatagattcatctccacgaaatacccgtgcctcaaaatcgtgtggcagatacagtattccttgtactttgcctcgtttcatccattctttggcttcattatagtccattgcctgactgtaaacatcagcttgcggagtagcatctagccaacggataaaattacggctcaactcactgtgcgaattgtcgactatggcgatagggacatctgtcacaatgttaggggcatacatataattatagagtaacccgtatacaaaaatacctcctatcaatactaacaatactgcatagctggtactgatagccagaaattcacgctgaatgatgaatgataactgttgtaatttacttaatgttttcatacttatgactttctatggctctttttaaatgaggaagcaacgaaaaagcgagcagggggaaaatacaaagaaacatggccgatggccaaagctgggtaaaaccgccactcccgtaaagcatattctgcatcatttccgtgaaatgccggactgggaaaagataggaagcatcccgaaccaacggatacatattgggaacaggaaaagttaccccggataaagtagctcccaaagagcctaccatagatactatgctaataatcagtgaaatggcaggaaataatgaaaataggaacaatcccaatgattgtgtcgcaataatgaaaagcattgtcattatattcattagccaccaactcccttgaaagggaatatgtagaattccgaacatcacataattggccagccaacctatcaggatatatataatagtataaggcaacagttttcctaatatcgccgttaccatattcccttttgcagcaactagccaatcagttactgtacgaaacttgatttcaatgccgattgcgtatactgtagtcaataaaattaatatttgaaataagacaaagaaaaatggctggctcaaataaacggagtaatccagacttggattatatattggatgattgcttgcctgtactggcaataagaaagttgtaatctgatcttgttccactcccagagcaacagcttgcatcacaacaggagagagtgacactggagccaatgctgtttcgaatgcagccattaactcgccacctacagacaataaagcataatgatagtagtaggaaagagttgcatcttgtcctgtaatggcgtcttgttcaaatttgggaggaatagaaagataaccataaatttcttttctttgtacggcttcccgagcggctgcttcattcacgaaatactttgttactttaaaagtcggtacggcagatatatttcgaataatactacgggaagtagcggtattatcctgatcgacaatgccgataggaatattttccatttgtccgttgccgaaaatagttgccataaagaagagtgtgaataatggcaggatgatgcagacaccaaaataaaggcgtcgcgaagtcattcgtcgccactcccggagtagtacggtacgaaagggtgaatatgtttgtgatggactcattcttttattaatttaacgtcagtaatacagacattcccggacgcaaatcttttatcttttgagtagggcgggcgtggatctcaaacgtgcgcaggtcataactaccaacctgtttggttgatttccaggttgcgaaactacctaacggactaatataatagattttaaattctatattctttttatcgatagcaggtacgtctgcaacaaatgtttcacccattttaaattgtggcattaagtcttcgcgtacattaagtacaacatgaacgtcattcatgactaccagattcataataggagttcccggtgcgaccaattcaccgcgtttagggaagattgtggctatttgtccgtcttccggtgcagtcaaccgggcatctaccagtaaggctgagacttcatcaacagtacttcgggcagcatctaccatactggcggcagatgctttgtcttccgtctgtgcaccatccactgccatttgatattgttcgtaagcagcgcgttcggctgctaatgctgccttatacatagcttctacttcgtctttccgttgagaagtaactacactgtccttgtataaagtaagtatacgattataagttattttcgcaagtgacaggtcgctcttagtcttattccagagttgcaatgcagtggctacaatctgtcgtcgggtgccggcatcaatttttttgttttgcagtactgctacttgctccaatgcattgacttgttgaaacttggcgtgtacttccggactattaattactacaagagtgtctccctgacgcacccaatctccctcttgaacgagaaacgtatcaatgcgtccgggaagttttccgctgatacggatttctgtggcctctgcttctccttgcagaaccagtggttgtttgtgcatcaatatcattccaagggcggtaaagataccgacgactagcaaaataataacaaaagcccatgaaagggttctactagttggtttcattgtttgttacggtttaggttgatagtttataaattgttcaggtgtaccacaaagtgaaagtaaattcattagtgctacatcatactcataataggctgccaggcgagctacttttacactggcaagcattgtttcggcatcaataacttcggtggaagttgccattccctctgcaaatgatttcttccggatacgtacaagttcctcacttaaagcaatcgtagcattcaatgcttttgcattatcctgtgctttttgcaattgcgtatagagtttatctactccaactgctagatcgtcacgggctttcatctgtccgagggctaatgtttgttgagttaacttcgactgccggatcttcttttcacgatctaatccgtcgaatagattccatgtaaagccaatgcctatcattgtacgtggcagtaaattactctgaatgccatgcgaatataaggtctgttttccgaaaagggctatattcggcagatagccgctttgagcaatcttcacttcctgtttggcaatatgttcttgtagctgtaactggttaagcatatagttcccactgttaacagataggtcgaaaagcattttcggcggcaaagagtcattcataaaaagtggagaagtgggaacaatgttttcatccatatcttttttattcagtaataccttgagcgtattttgaaccacagtttcatcttttcgtgcagcatccagtgtacgtttggcttcgtccatatttacttgggcaaaaagccgtcctgctttgtcaatcattccggcagcttccagtttcagtgcattctcataatgtttttgcagtcccttataagtttcttcccgaacggttacgatttgctgtgccagccgtaatccgtaataactttccgttaacagattttgttgggtagcagcagtctgtgcccggttttcacgtgccaagtccaccattgtccggccgatattagttgcatgaaatcgttttcctccggaaaagagtacccattctgcagataaatcaatagaggttaaattacgtggagtcagggggaaaacaagagtatttgcccctatctgatccagaatcgccgaaataacttgatcgtccggaattatggaatgtacaaaattctttgccggatctgtaaattgagacaacggctgcttcacctcgatcttctccgacatatgtacaaatgcacccgaagattgaaggctgggataccaaaaagcattcaatttatctcgctctgccttagctatttctatacttttatcggctatctttaagctttgattttcttgtcggagtagacgtaatgattcctcaaaactcaatgaaacctgtgcatctgcccaaatagcagagaaacacaaagcaagtagtacaaaaagtgatttattttttttcatgctggttaggttaaatctaaatttgagactttctaacagatgaaggaacaggtttgttcactccaacaaatggagaaacaactttttaaactcaatgaaagagttatcgattattctgatttagttcaaagttatgtaatatttcccctattaaaaaatcaaggattttatttgagatataaaaattatatttacctttgcagtgtaatttaaaggaagatcctttaaactggtaaaaatgcggtagtagctcagttggtagagcattagcttcccaagctaagggtcacgagttcgagtctcgcttaccgctcacgataaaagtcagatagttattttttagctatctggctttctttttgtgactgaaagataacaatgggcaaagtctctttctactatgaaaataatgcatgaagaatagggcagttcatgcatttttcgtatttttgcaccctgttttgacacttatgagtactttaaataaaaaaatataatggcaaaagaactgaaagaccttaccaaacgtagcgagaattactcgcaatggtataacgatttggtggtaaaagctgatttggcagaacaatctgccgtacgcggatgtatggtgattaagccttacggatacgctatttgggagaaaatgcaacgtcaactggacgatatgtttaaagaaacaggtcacgtaaacgcatatttcccattattaattccgaaatcattcctgagccgtgaagctgaacacgtggaaggtttcgcaaaagaatgtgccgtagtgacacattatcgtctgaaaaatgcagaagacggttcgggggtagtagtagacccagccgcaaaattggaagaagaattgattattcgtccgacatcagaaacaattatctggaatacttataaaaactggattcaatcttatcgtgacctgcctattctttgcaatcagtgggcgaacgttttccgttgggaaatgcgtactcgtctgttcttgcgtactgctgaattcttgtggcaagaaggacatactgcccatgctactcgcgaagaagctgaagaagaagcagtaagaatgctgaatgtatatggtgaatttgcagagaaatatatggctgttccggttgtgaaaggtgtaaagtctgccaacgagcgttttgccggtgcgcttgacacttacactatcgaagctatgatgcaggacggaaaagcactgcaaagtggtacttctcattttctgggacagaattttgccaaggctttcgacgttcagttcgtgaacaaagagaataaattggaatatgtatgggctacttcatggggtgtttctacccgcttaatgggtgccctgattatgactcattcagatgacaatggactggtattacctccgcatctggctccgattcaagtagttattattcctatttacaagaacgatgagcaactgaaacaaattgatgccaaagtagcgggtattgttaccaagttgaaagcattaggtatttctgttaagtatgataatgcagataataaacgtccaggcttcaaatttgcagattatgaattgaaaggtgtacctgttcgtctggttatgggtggacgtgatcttgaaaacaatacaatggaggtaatgcgtcgcgatacacttgaaaaagaaactatcacttgcgagggcattgaagcttatgttcagaacctgctcgaagaaattcaggctaatatctacaagaaagcattggattatcgtaattctaaaattacagtagtagacacatacgaagaattcaaggaaaagatagaggaaggtggttttatcttggctcattgggatggaacaactgaaacagaagaaaaaatcaaagaagaaacgaaggcaactatccgttgtattccattcgagtcgttcgttccgggagataaagaaccgggcaaatgtatggtaacaggcaaaccgtctgcttgccgtgttatatttgcacgctcttattaaactgtgcggttaaacagttgaaagaaaggtctatttatttaataaagatattactttctcatacaagagtccgaagtttcagattaaatttcggactctttttttatccatttcagttttttttcagaaatatcctctttctttgtatcatgtaagaaagaaaggagaagattttatgaagatattaattgtagaagatgagccctctttaagggaactaattcaacgttcactggagaaagaacgttatgttgtagaagcagcaggtgacttcaactctgctttacgcaaaattgaagactatgactatgattgtatcttattggatattatgttaccggacggaagtggtcttgaccttctagaacggttgaaagccttgcataaacgggaaaatgtgattataatttctgccaaagattctttggaagataaggtcttgggattagaattaggtgcagatgattatttgccgaaaccgtttcatctagctgaattaaatgcccggataaaaagtgtaattcgccgcaatcagcatgacggagaaattgatatccgtcagggaaatgtacggatagagccggataaatatcgtgtttttgtcaataatcaggaactggaattaaatagaaaggagtatgatatcttattatacttcataaatcgccctggacacttggttaataaaaatacattggcagagtctgtatggggagatcatatcgatcaagtagataacttcgattttatttatgcccaaatcaaaaatcttcgtaaaaagctgaaggatgcaggagcagatcttgaaattaaagcagtttacggattcggttacaaaatgatagtagaataacagaaacaataggagtcatccatgaaattaatatattacatcattctccgcatcactttagccttgacacttatcctgacaatttgggccgtatttttttatgttacaatgattgatgaagtaaatgatgaagtcgatgattcacttgaagactactcggagacaattatcattcgggcattggcaggagaggagcttccttctgaaaacaacggttcaaataatcagtattatcttactgaagtaactaaagaatatgctggaaaccgcaatgatatccaatataaagattctatggtctatatcgtagaaaaaggggaaacagagccggcgcgtatcctgaccactatctttaaaaatgacgaaggacgttattatgaactgactgtatctactcccagtatcgagaaggatgatttgaaagatgctattcaagtatggattatctttttatatgtagccctgttactctgcatcataatcatatctgtatgggtattctatcgaaatatgcgtccattatatgtacttcttcattggttggacagttatcagacgggaaagaaaaacgaagcattgaacaatgatacccaaatcacagaattccggaaactaaatgatgcagctgtccgatatgccgaacggacggaacaaatgttcgaacaacagaaacaatttatcggaaatgcttcgcatgagatacaaacaccacttgccatttgccgtaatcggttggaaatgttaatggatgatgattcattgtcggaaaatcaacttggagaactaatgaaaacgcatcagacattggaatatataaccaaactgaataaatctttattattgcttactaagattgacaatggacagtttactgataccaaagatttggaactgaacacacttctcaagcaatatttggaagactataaagaggtctatgattaccgcaacatagaagtaaatatcactgagcaggatcgttttcatattgtaatgaacgagtctttggcagttgctctattaactaatctcttgaagaatgcattcgtgcataatatggacggaggacgtatacagattattattacaaaaaacagcattactttccgaaattccgggtcaggacatccattagatgaagaacatatttttgaacgtttctatcaaggaagtaaaaaagaggggtctaccggactagggctggcaatagccgattcaatttgtcgtctacaacatttgaatatacgttattacttcgaacaagaggagcattgtttcgagattttgaaatgatcgttttcgtcacagagaacacaaaggacacggagtgagagtgaacaagatatttatcggttattataaactgatcgttcaaactatttctccgtgtcctttgtggattttgtggtacgaatctctatcgggatcgaatttctcttctcataaacataatataagagatagcaaaacagataactgttgctgcaattaatcccgtgagttgtggccatactaccagaagactttgtcctaatggaagtgggcttggaatagctccctgaacttgttccattgtaagtggtcctagacttcttacagaaggcattaacagcgtcgtagtagcttcattaaataactcgctaggtgccagacgcattaatccgagaatgaatttttgataactgatgatctgataaggcgacgccatttgtgaagggctcaatccttttgccaccagatttacaatcattgtgtagaatacgctgaaaaacaaccacactgccacagatgccaacgctgatgtagctgcctggcgaaaacgcaatgaaaataggattgccaaattcaaccaaaaagcaacatagaaaatacttgttataatgaagaatacaattctccaaaattcctcagccgtaggaggaataccgattgcaatcagtccgaatcccattaccagaaaaccgagtacgaatagcataacacctattactatcaaagcagccataaacttcgcattaattatgcaatcacgatgaataggctgagataacatacggcttaatgtccccttattttgctctgaattgacggcatcaaatcctagagcaatacctaatagaggtcccaaaaagttgataaacaacgtaaaagaggggagagttccgtccgaagctgtaaataatttcaaaaacagaaacgaaccatccggatcattcggctttattgctgcgccaatattagtaagggcagtgtatagagaacccatacaggtcagtgcaataataccgatcaaaataataaaacgccaacttttgacatgatcggatatttctttattgacgataacccaaaaaggatgattgacttcattcatgttgttctcctccttcctcaaaataatgattatagatatcagacagttcctgtttcttatctttcagttctgtcatatcaatcagtgcgagtattttcccattactaaataatccgacccggtcgcatactttttgtacctgatccaggtgatgagaggaaaagagcacggtcaatcccttctccttacttagccaacggatcagttcgataaattcctgaacaccagcaggatcaatacccgaagtcggttcatccagaataataatttccggattcttgataagtacatccgcaagtcccaaccgttgtcgcatcccgcgtgaatattttcctgctttctttttcagttgatcttccaatcctgtacgtttcattaactccatggccttttctctcgcttccttatcaggaataccattcaagcgtgctgtgtatatcagattttccagtcctgtcatatcatcataaaatcctacatcttcgggcaaatagccgatttttctttttacttcgatagggtgtgtagtcgaattgatgccgcaaatctcaacggaacccgatgtcggttctgtcaaccctaacatcattaaaatggtagttgattttccggcaccgttcggacccagtaatccgaatatttctcctttttgaatatgcaggcgaatatgatccacagcagtaaaattaccgtattgtttggtcagatcggtaagtacgatcacttgttcgcccataatttacctccttccatatttacggaacagatagtaaactacaccgatagcagccgcaataatcaaaacgcctacccacccccatatcatcggagtttttactgcgattctgaattgcgcatcagcgtttacttcaggagtttttgccataatggtagtcacatagtcacctgggagtgcttttttagaagcttttaatatagcggttaccgtcgatgtttcgccggcttttaatgcatcaatttttgttggttcgaaagttacttcccaatcagctggtttgctggcagataactggatatctttcaacaatgatgaacctgtattttttacttccagttcaattcgcttcacgtctccggcagtgatatcggtgcttagtaatcctctcggagtagttagttccatttgaaaagaaccggtcacaactacttccaattcaagttcagccgaagtagttcccgtagcagcgcgtaccgggattttatagcttccggcttctacattggcaggaggagtaatatctatgcttacattctggctactgttgggttccacttgtgcagaggtagcttgcttgtagttaggtttaaaaataacattccatcctcttggcgcattagccattaaagcatacaactgttggtcggcagtctggttctttagagtggtactgaaggtaaaggttgacttggagttaccttccatattgggctggtcggtagtaaattcagtctggtaagtaccttgttgagcaactacaacatccaaaggaagttttacatttccggcatacactacaaaatgatagtttcctttatttactttcaatggaacatcgactttcagattaaaagtctttttttctttgggaagtacggacaattgactaaggctccaaccgccggatttcatttcgtgtttccaactgctgcccaatccgctaacagaaaggtttgcatttgtcaattcatccgaattgttaatgaggtcaatactgtaatcaattgacgctcccggtgatacagaaattttggtgtagggagtgtacagaattacgcttttaggaattgagtcgtttgcgtgtgtgtagttcaagggaattaatcccaatagaatagctactaataaaaaacaatttgttctcatagtcataaaaaagttcttatggttatttaatatgaatactgtcaaatttgtgtttgcaaaaataaacgatgtgtttattagtagttttaaaagaatcataaagaatctaattctgtgatgaaatatatagtgacgttatttccattcgatagtgacgatattccatagatatggtgacactatgttgagggcatagcgtcactatatttttatgagatttattttttcggaaattctcaaaattcccaaatcttttcagattttcccctcatctttgcaatataaattaaatgataacagtaaaaccaattaaaaaaacaacgattatgaaaaagttagtattcttattagtatgtttgtttactttgcaaacagtagcacgtgcagacgatgacaaaccaatccaggttactcaaatgccacaaccggctcaacagttcatcaaacagcattttgccgatagtaaagttgctttggcaaaaatggaaagtgatttcttctataaaagttatgaagtgattttcacgaatggcaataaagtggagtttggcaagaatggaaactgggaggaggtgaattgcaaatatacttctgttcccacagctattatccccacaactattcagaaatatgtgacaactaattatcctgatactagagtgctgaaaattgaacgcgataaaaaggaatatgaagtgcaactttccaatcgtgtggaattaaagttcgatctgaaattcaatttgatcgatattgataactaaaccttaaaaaaatagaactaatgatgaaacgaaagatttttacctttttattggtattaggtgttgcatggagcttacatagttgcgataataatgatgatgaatcaatagctgttcctgttgaattgcaaagtacattttcggctaaatatccgaatgccacaaacgtagaatgggaaaacaagtacggatattacgtagcagatttctatgacggacatgaagcatctgcatggtttactcaagaaggtaagtgggttttaacttcatgggaggtacatttcaacacattgcctgatcctgtaaaaaatacgattcatgctacatatcctggacgagttgatgacgacgacactgaatatgttgaagaagcaacgggtgctacatactacttgattgatatagaaaatagtgagatagatgtgaaaataagagctgacggacaaatacttgactaataattgtacaataatcttattatggaacggtaacgaactattcatttatagttttaggtagagtcaatcatgcgattattttttatgggtttcatgccttgaaaataagagtttcacctagagaaactcttattttcaaggcatctgcgttttatcactgctcatgttgcctttttaatacagactttgctgtattggcatttccgatactgtctgtctgctgtttggacttttcttcctgttttcgtttattacgtagcttccacttattccaaaagaacaggtcactccatttattgaaatctttcttgtacataatacctacaccttgtgtagtcagatttgtctttgtataatatcggtcgttcgtttcattgtaagctttcaaacgaatgtctcccgaacggtttatcagccattctgcttcaaagtcgcccacaaaattcgtgtttgccattggattatcccgataaccaaagtttccgttaataagtaaccggttattcagtaactgaccggacaagatgccttccacttccatatctgtccagcctttatcgcctgtgcttagatttgttccaatattccagttattcgtttcaaagacttgcgacaaggcgttattcaactgaccggagagggtggaagaaagtaccgaagacatcacgtttgaattttgattattacgtgcatcctccgtgtagaacttaccaatacccaatagataaaggatttgcatattcatctgttcttccgtactaatataattacgtaccaatgtttgtacttcatcccgttcgttcggaagctcaatacctaatttaatagtaggtcgtaccaatatcccgctcaaattcatgatacagttcaccttaacattgggttgttgtatgattgacgaagattcttccggtatcaggtcattcagagatgctgaatttaccgtgtaggaagcctgaatgtctaagtttgcatccagaggggcaccgttaaaggtaatcgtacttccgttcttgataacaaagtctttacggatcacttcctgcaaactgaatttatatactccctgattaatttggtagctaccgaacatcttcacatcccctttattgtaaaattctgttcgtatatttcctgtacccttgccactgatataatctccggcaacaggatccatgataatcttcattgttgcatctggcgtcgcatctacaagaatattcaatcgtatatccgtcttttgctcttcctcagcttcctgacgtttttgttgcaattgttcataataagaaattatttgaatagaatcctgaatagtgcggcggggagttttgtctacaaacttgataaactggttactcgtagctgatgcaacactaccattaatataagtaaagatgctatttcgattggtcgtcatggcgacattaacatccagtccctgtatggcatttccggtaagcaatgcgtttccggtaccatacaccgtgccatagaaaggcatgtccgtcgattcttttgtattcattacaagcatgttgtttgcttgtatctcaaaacgataatttaagttcttaaaatgctggaaatgcagataaccgttcattcttcccgaatggccttccatatcagaaatatgtatattgttgaacgtcaatccggtaggagctaaaagaatggtatcctttatagcaaaatgagtattcaaaatatcaaaattcatggaagcatccgtcatgactgcgccatcgagattcaatcctttaaatttcccgtagaagtgtactttacccgttgcccgtccttttatatcatttgcaatagacttcatataatgttccagaaacttcagattcagttcatttgcttcgatatttaagtcaagcccactttccggttttagcggatgaatgatgccggtgacacgtgacggggtcgtagaaatatctttgatagatgcatccagtcggattcctctattttcattatcccattcgccatatatgttcaaatcgcccaaacgtccttgattaagagagaaattttttataaataaacgcgtattcatcacaggttttttgaaaacaccacttgcataggcagttcctgtagcatctccttcaaaatttacatcatcggaaatacttgcaatatcaaacacatatcccatgttgatatcctttaaatcaacctttacactatcttgcggattgtccgaaagacgtccgtttatacgtacataacgatcctggtggctaaaatagaagttgttcacgtctaccttgccggaatccactactacctgtgaaggatgtatctgccaaagggtatcattcagaataatatccgtcggtttcacctctaccattgcttttaataaaggcttctctccttcggtacgcaagaactttgccacagcggccaattgcccgctatatgtcaccgcagcactatttccccaattcaatgtcgtactgatattgtcgtctttagcttgcgcatccaaagaaaggttgactgctcctttcttcttcagattggtcaggcgcacccgcgcacgaatatgatctgatggattctcgcacaaaatcatgcccgactcaataaagttgttcttatattgaagacgggggaagtatccttccacacgcaaacgctgcaagggatcattaaagtatcctttcaaagtggaatgagtatataccgtcagcggaatatcaaaaatcgtggatagaatatctgtattatatatatgtatatcgaattggaaattattgtgtgtttcaattggctttttgggaggtaatattaatgacgggacatatttccgcataatattcagaatgctggcaggcaatgtgtgatactggaactttccttccacacttgctgtcagaaactcagaagtcaatctcaactgattctcgttattctgtttactggcccggatattcatgttgttcatgaagtattgtttctctggtgacataaattcgaggctatccacattgatttctccaatcatttcgtcaactgagcctcccgtgaagttggctcttagtttcaaagagaattccgtatccggatacttggaggtgagattcaggtcatgcggccgcaatttattgataatagcttgaaaattaaatgtaggaattctggaggaaacattcacatctccattcagataaatagagccattcggatcatccagtgctactttgccattaaatcctccttgcttatattctccgtccagtgtaatattctcatatctatatctactataatctacggaggctatcagccctttcaattcaacaacagggagtcggtcggttacatggcgcccatgtacatctaagttgaatgtgatttctcccagttgctcgttagccaataatttacctaacttatagtcggttgttttaacggcaccggaataagcaaacaatcccttacttttatcagaactcaatttcaagtccatattgacaccgcccaaatcagtatgcaattggccataagttactatatctgtgaaatagccagaaacctctccccggaaactgacatttcccaagcgttccagtactggaggcactccattataatcatgactcaaattgcggactaaaaatcctacgccacgagtagtagcagtaagttcggatagggttccaaacacataagcgtcttgcggatgcgacaagtcctgaagtgccacatctcctttaaggcggaactgacgattgtcggctgttatttccagatgcgaacaggtcaattgattgacagtaccttttacttccatatccaacgatatcggctctttgaagtgcgatagcgccggaagaaaaggagaaatatcttttaaagtgatttgtgacggcaacgtacggaaagaaaaacgaacctgctccgtaaaacggtcaaaggctttcaaactatcatatatcaaatgaattgtatccagtttcagagatgtttcgggcaattcgatagcaaaattgtcaatgcttgtctgcctgctattggcaactagcttcagactcatcttcttcaaagagaaaccggatactttttcatcaaggctcaaccgcttaattcccagatttattgaatctttactcaaggctttcaatgaaatattagctataatattctgaagatggatgtgtttggcattaaacttcccgggtgtttcttcttctgaaagtacatgataagccattcgcccacgacgaatcaggatagaattaatacgcaaatccaatgagttgtctttcttcaccgtatcattggaagcaaatgcatctaatacgaatttaaaattaggtggagagtctggtgtctttttttgaagattgatattgaaaccgaataactggacactgctaatggatatcttacctttaaaaaaaggcatgatatcaaatttggcagacaaacgagtcactttgagcatttcctgctcgtcttggtcgtcaagcaatacatcgtcaatgatgatacggttcaacaatcctatatttatccggccaattgtcacccgtgtattcaataagtcggagagctcctcggctacaaatacactcatgacttgctgaacacttggtatattcagcaaaacaatagttccgatatatactcccagtacaataccaactacccagcgtacagtctttttcagcgttctgataagcgattatttttattttgcgaacaaaaatataaaatagttcgttatgaatcgtagttttatgattacttttgcaccgttttaatagtttaattacttatgagtgtaataatattaggaattgagtcctcttgtgatgatacgtcggcagctgttatcaaagatggttatctgctgtcgaacgtggtatcgagccaagccgtacatgaagcatacggtggagtagtacccgagctggcttcacgggcgcatcaacaaaatatcgtaccggtagtacatgaagcgctgaaacgtgctggagtcactaaagaagaattgagtgcgatagcttttacacgtggtccgggattaatgggttcattgctcgtcggtgtctctttcgctaaaggattcgctcgttccttaaacattccattgattgatgttaatcatttgaatggacatgttttagctcattttattaaagcagaaggtgaggaaaatagacaacccaattttcctttcttatgtctattagtatctggaggaaattcacaaattatattagtgaaagcctataacgatatggagattttggggcagacgattgatgatgctgcaggtgaagctattgacaagtgctccaaagtaatggggctcggttatccgggtggaccgattattgataaactggcacgccagggaaacccgaaagtattcacattcagcaaaccgcatattccggggctggattatagctttagcggattaaaaacttcattcctctattcattacgtgactggctgaaagaggaccctgattttatagaacatcataaagtggatttggctgcatcattggaagcaacagttgtagatattctaatggataaattgcgtaaagctgcaaaagaatacaaaatcaaggaagtagccgtagcaggaggagtttctgcgaataacggattacgtaatgcttttcgggaacatgccgaaaaatatggttgggatatctttattccaaaattcagctatactaccgacaatgcagcaatgatcgctattaccggatattttaaatatttggatagggatttttgctctattgatcttccggcctattctcgcgttacattagaataatttccttattgaaaataggctccttgtccgtaagactaaaaatataccttaatatataggataaaataaggaaagtatgtttgctgaaataataaccattggtgacgaactgctgatagggcaggttgtcgacactaattctgcctggataggacagaaattaaataagataggcattgaggttcttcgtattgtttcaatccgtgaccgggaagatgagattcttgaagcgatcgataatgcgatgaaaagggtgaatattgttttagtgaccgggggactaggtcctactaaagatgatataacaaaacaaacgctatgtaagtatttccatactagactggtatttagtgaagaagtttttgaaaacataaaacgggtgttggccggaaaaatccccatgaatgccttaaataaagggcaggcaatggttcccgagggctgtaccgttataaataatccggtagggagtgcttctgttagttggtttgaaagaaacgacagagttctcgtttcaatgccgggagttccgcaggagatgaaagttgtgatgacggaatccatattgcccaagctgcatgagaaatttcaaacggatgtgattatgcatcaaacatttcttgtacaacactatccagagtctgtattggctgaaaaactggaactatgggaaactgcactgccggaaagcatcaaactggcctatttaccaaaacttggaataatccgcctgcgattgactggacgcggacaagataaaaaagaagtgcgggcgcttctagatagcgaaaaagctaaattagagaaaattttgggtgaagatatcttctgtgaggaagatactcctttggaagttattatcggcgaattactaaaaaagaagaaaataaccgtttccaccgcagaaagttgtactggaggaagtattgccgcacgattaacatctattgccggaagttcggaatattttaatggaagtatagtggcttattccaatgaagtaaagatgaatctcttgtacgtttctcccgaaactttggaacggcatggagctgttagtgaagaaactgtgattgaaatggtaaaaggtgcgatgaaagcattgaaaaccgactgtgctgtggcaacttcaggcatagccggtcccggaggaggaactcctgaaaaaccggtagggacagtttggatagctgctggttataaaaacgaaattcgtacttacaagcaggaaacaaatcgcggaagatccatgaatattgaaagagccggcaataatgcgttattaattttacgggatttactcaaataagggaaaattggtattcggaagtgaattattttaggaatttcttgttttatacggataaaagtgcttactttgcgtcctgtttgaaagaagtatagatataaaactataaaaataagatagaaatgtcgaagatttgtcaaattaccggaaagaaagccatgattggcaacaatgtttcacactcaaagagaagaactaaaagaacctttgatttgaacttgtttaataaaaagttctactatgtagaacaagattgttggatcagccttagcatttgcgctaacgggttgcgtattattaacaaaaaaggactggatgctgcgctgactgaagctgtggctaaaggttattgtgattggaaaagcattaaagtaatcggctaaacgtagaggagaaaacttacaatggcaaagaaagcaaaaggtaacagagtgcaggtgattctggaatgtacagaacacaaagacagtggaatgccgggaacatctcgttatatcacaactaagaacagaaagaatactacagaaagacttgagttgaaaaaatacaacccaattctgaaaagagtaacagtacacaaggaaattaaataataaagaagtataacccatggcaaagaaaacagtagcaagtttgcacgaaggctctaaagaaggtcgtgcttatactaaggttatcaaaatggtaaaatctcctaagactggagcatacgtttttgatgagcaaatggttccgaatgaaaaagtacaagactttttcaaaaaataattgaaatagcatacgcgctataaatacaaaatcctctcattgacaaacaatgaggggattttttattgcttcttttttttacttttcaatcctttgttatatctttgtagcattatgtattatacaaacaactgtcaatatgggattttttagttttttttcaaaggagaagaaggaaactttagataaggggttatctaaaaccaaagagagcgtgtttagtaaaatcgctcgtgccgtggctggtaagtcaaaggtagatgacgaagtgttggataatctggaagaagtgttgattacgtcggatgtaggcgtagagacgactttgaatattattaagcgcatcgaaaaacgtgctgctgcggataaatatgtgaatactcaggaattgaatcatatattacgtgacgaaatagccgctttgttgaccgagaataactcggatgatgtagctgattttgatgttccgatcgaaagaaagccttatgtgattatggtagtaggggtcaatggagtgggaaagactacaactatcggcaaactggcttatcaattcaagaaagctggtaaatctgtttacttgggagccgctgatacattccgtgcggctgctgtagaacagttgatgatttggggagagcgggtaggggtgcctgtcgttaaacagaaaatgggtgctgatcctgcatcggtagcttatgacacccttagctctgctgttgccaacaatgctgacatcgttattattgatacagccggacgcttgcacaataaagtcggcctgatgaacgagctgaccaaaattaaaaatgtaatgaagaaagtagtgcctgatgcaccggatgaagtattacttgtattggacggctctacaggacagaatgcttttgaacaagccaagcagtttactctggcaacggaggttaccgctatggctatcactaaacttgatgggactgctaaaggcggtgttgtaattggtatttccgaccaatttaagattcctgttaaatacatcggtttgggtgaaggaatggaggatttacaagtattccgcaaaaacgaatttgttgattccttgtttggagaaaatgcatgaaaagaaagagaatagatataatcactttgggatgctctaaaaatttggtggactctgagcagttgatgcgtcaactggaagaagtaggatatagcgtgactcatgatactgaaactccacaaggggaaattgcagtcatcaatacatgcggtttcattggcgatgccaaagaagaatctatcaatatgattctggagtttgccaaaagaaaggaagaaggtgacttaaagaaactttttgtaatgggttgtctttctgaacgttatctcagggagctggctattgaaataccacaagtagataaattctatggtaaattcaactggaaggaacttttgcatgatttggggaaaagctataatgaggagttgtatattgaacggacgctgaccactccgcagcattatgcttatctgaaaatatcggaaggatgtgatcgtaaatgttcgtattgtgctatcccgattattacaggacgtcatatatctaaaccgatagaagaaatcttggatgaagtccggtatctggtgtcgcaaggcgtgaaagagtttcaggttatagcacaggagctaacttattacggagttgatttgtataagaaacaaatgcttccggaattgattgaacgtatttcggaaataccaggagtagaatggattcgtctgcattatgcgtatccggcacatttcccgattgacttgtttcgtgtaatgcgtgaacgtggcaatgtttgcaagtatatggatatagctttgcaacatatcagtgacaatatgttgaagctgatgcgtcggcaagtgacaaaggaggatacttacagactgattgaacaattccgtaaagaagtccctggtattcacctgcgaacaactttaatggtaggacatcctggagaaacagaggaagactttgaagagttaaaggagtttgtccgtaaagtacgcttcgatagaatgggagcttttgcttattcggaagaagaaggtacttatgctgcagaaacttatgaagattctattccgcaaaaagtgaaacaagcccgacttgatgaattaatggatattcagcagggcatatcggcagagttgagtgcagaaaaagtcggtaaacagatgaaaattatcattgatcggttagaaggcgattattatatcggaagaactgaatttgattcgccggaagtagatccggaagtattgattaattgttctgaaaaagagcttgagatcggaaagttttatcaagtagaagtagtagatgcagacgattttgatttatatgcaaagataataaatgactatgaataataaggaatttacatctgaactagctgaaagactggggtacaccattaaggatacttccgaattaataggttctttactgtctgatatgatacaagaactggaagaaggtaacgtgattgcagtacaaggattcggttcttttgaagtaaaaaagaaagcggaacgtatttcaattaatccggcaagtaaacaacgtatgttggttcctcccaaattggtgttatcttataaacctagcaatacattgaaagataagtttaaataaatatttcccgttatgaatgaaagactaacaattcaagaccttactgacttgttggctgctaaacatagcatgaccaagaaggatgccgaggtgttcgtaaaagagttttttctcttgattgaacaagccttggaaaacgagaagactgtaaaaatcaaaggattgggaactttcaaacttatcgatgtagatagccgggaaagtgtcaatgttaacacaggtgaacgtttccagataaaagggcatacaaaggtttcattttctccggacgcgaatttgagagatacaattaataaaccttttgcacatttcgagactgttgtgttgaatgaaaacacagtattggaagatactccggtagaagaagtggaagaggaagaagtaggtgaggaaattcttgcttcaacaatagaagattataataaaaaggaggaaagtcaagagaatacttctaatcctatagtagaaaatgaaagtcagattgctgaacaagattcttccgaagaagtggatacggttcaggaggaacgaataacggaacagtctattgaagaaaaagtagtggttgaagaatcacttatggttgaacaacaacagccagaacaaccagtaaaagagaaagaaaaaattacggcagagcagattattgaacaagaacttctgaaagcaaatctaaagcccgaaattccaatagtatcaccacagtcggaaattacaaagccgactaaagcttctgtacaaactactgttagcccgatatctaaaaaagaggttgttaaaaaggagaaatctcctgttccttatttgatagctgtaatcgtcatagtattgttactatgtggaggtgtgattttatttatctattatccggacctgttttcttcttcatctgacaagaataccctcgatatgccgcctgtaacaactcaacctgttcgaactgaagcgcagctttccgatactattgaacataaagatactgttgtagaagtaactgttactacaccgaagaacgttgttgagccacagtcaattgtaaaaaaagaagagatattaacttctgcaaaggctgagagtaggcctgtccagcagcaaccttcagcttctgtttatcctgattctgcatcatataaaataacaggaacaaagacaaagtatacaatcaaggaaggtgaaactttaacaagagtttctttacgtttctatggtacaaaagcgatgtggccatatatagtgaagcataatccggatgtgattaaaaatccgaataacgtgccttatggtactacaatcaaaataccggaacttacaaaagaataattataactatctactcccccggctatacattacttgtactggtcgggggaagtgttatggatgtacaaaagcgtatgaaagtaccttaatctaaagatttcgcattgttttttaataaaaattagttgcaatcgttaattatatggcgtacttttggaagcaaaataaaaagccttatacacaggcaaggcttacatcaaattaatgggaattaaataataaaatattaagtatttatggctgaatcaattgatatccgcgagctaaatgagcggattgaaagacaaagtgctttcgttaccaatcttacgacaggtatggaccaaatcattgttggtcagaaacatttggttgaatcactgcttatcggattactctccgatggtcatgtccttttggaaggtgtgcctggtttggcaaaaactttggctattaaaactcttgcttctttgattgacgctaaatatagccgtatccagtttacccccgacttattgcctgctgacgttatcggtacaatggtttacagtcagaaagatgaatcgtttaaagtacaaaaaggaccgattttcgcaaactttgtattagccgatgaaataaatcgtgctcctgccaaggttcagagtgctttgctggaagctatgcaagaacgtcaggttactattggtaaagagactttcttattaccggagccttttcttgtattggcaactcaaaaccctatcgaacaagaaggtacttatccgcttcctgaagcacaggttgaccgttttatgctgaaagttgttatcgattatccaaaactagaggaagaaaagttgattattcgccagaatataaatggagaaaagttcaatataaagccaattctgaaggcagaggaaattatcgaagcacgaaaagtagttcgtcaggtgtatttggacgaaaagattgaacgctatatcgtagatattgtatttgcaactcgtttcccggaaaaatatgacctgaaagaattgaaagatatgatcggatttggtggttcgcctcgtgcatctatcaatcttgctttagctgcccgtacgtatgctttcattaaacgccgcggttatgtgattccagaggatgtacgtgctgttgcgcatgacgtgctccgtcaccgtattggactgacatacgaagccgaagcaaacagtatgacttcggacgaaatcatcagtaagattttgaataaggttgaagtaccttaattggtagttaactacttaccacttaactactttataaatggaaacaagtgaaatactaaaaaaggttcgccaaattgaaatcaagacacgaggattgtctaacaatatttttgcaggccaatatcattcggctttcaaaggtagaggaatgtccttttcggaggttcgtgagtatcaatttggggatgacatacgtgacatagactggaacgtgacggcgcgcttcaacaaaccttatgtgaaagtgtttgaagaggaacgcgaactgacagttatgttgatggtcgatgtttccggaagtttagaatttggtacggtcaagcaattaaagaaagacatgataacggaaattgccgctactcttgctttctctgctatccaaaacaatgataaaatcggtgtgatattcttttcagaccggatagaaaagtttattcctcccaagaagggacgtaagcatattctatatattattcgtgaattgattgattttcagccggaaagtcatcgcactaatatacgtcttgcattggaatatctgactaatgttatgaaaagacgctgtactgcgtttgttttatccgactttatcgatcaggaaagtttcaaaaatgctttgactattgctaaccggaaacatgatgtagtagcattacaggtttatgataggagagtcagtgatcttcctccggtgggattgatgcggataaaagatgcagaaacaggacatgagcaatggattgatacttcttccaaagctgtacgtcgggcacatcgcgactggtggatacaaaaacagacagaattgaatgatacatttactaaaagtaacgtagactctgtatctgtaagaactgaccaggattacgtaaaggcattgttgaatttatttgccaaacgaaactaatgaaatcaaagatgaataaaaatattattctgatagcattgttatgtttactgtctattgatagagtaggagcacaatctgtaacagtggaggcaaagatagattctttgcagatactgattggtgaacaagcgaaaatacaattacaagtagctatggatgccaagcaacgggctgtttttcccgcttataccgatacactggtacgaggggtagaaattatagaaactgccaagccggatactcagttcttgaacgatcgtcagcgtatgatgattactcaagagtatactgttacttcttttgactcggctttgtattatctaccaccaatgcctgttacagtagatggcaaagagtatagatcaagagctttggcattgaaagtatattcaataccggttgacacattacatccagaccaattttttggacagaaaaccgtgatgaaagctcctttcgcatgggaagactggtatgggttaattggctgttcattcttggctttgcctttacttggtctattgatttatctcatagttcgtatccgggataacaaacctattatccgcaaaataaaggtagaacctaaattgccgccccatcaggctgcaatgaaagagatagagcgtatcaagaatgagaaagtatggcagaaaggacaaccgaaggaatattacacagaattgactgatacacttcgcacctatataaaagatcgttttggtttcaatgcgcttgaaatgacttcatctgagattattgacaagctattagaaatgaaggataaagaagctatttctgatttgaaggagcttttccagacagccgatctagtgaagttcgcgaagcacgatccgcaaatgaacgagaatgatgccaatctgatcaatgctattgactttattaatgaaacgaagcaacctgaagaagaaaatcaaaaaccgcaaccaacggaaattacaattatagagaagcgttctttgcggacaaaagtattgttaatttgcggaatcgcaattttgtcaaccgcattgataggtacctttatatatataggtatgcagctatataatctttttgcttaaaagtatatatagcttgaatactaaatagtaaactgttaaatcataaatgaaatgatttttgccaatattgaatatctgtttttgctattattacttataccttatattgtatggtatattctgaggcaaaagaaaagtgaagcaactcttcaaatttcggatgctcgtgtatatgcacatacacctaaaagctataagaactatttgttgcatgttccattcttattgcgtgttattgccttagtgctggttattctagtgcttgcacgtccgcaaacgactaataaatggcagaatagcgaaatagaagggattgatataatgctcgctattgacgtatctactagtatgttagccgaggatttaaagccgaatcggttggaagctgcaaaggatgtagctgctgaatttattaacggccgccctaacgataatatcggtataactttatttgcaggtgaaactttcactcaatgtccgcttactgtcgaccatgctgttttattggatatgattcataatatcaaatgtggccttatcgaagatggtacagcagtaggtatgggaatagcaaatgcagtaacccgactgaaagatagtaaggcaaagtctaaggtgattattttattgacagacggtactaataacaaaggggatatttctccattgacggctgctgagatagccaaaagttttggtattcgcgtgtatactattggggtggggacgaatggtatggcaccttatccctatccagttggaaatacggtgcaatatgtaaatatgccggtggaaattgatgagaaaacgttgacacagattgcaggtacaaccgatggtaactattttagggctacgagtaactcgaaactaaaagaagtatatgaggaaattgataaactggaaaaaactaaactgaatgtaaaggagtatagtaagagggacgaagaatatcagtggtttgcattggcggctttcctttgtgtgttattagaagtgttattgcgtaactcaatactcaaaaagattccataaggatgtttgtcaatcgttatttgtcaatcgtaaaataagaagaaaatgttccgatttgaagaacctacatatttatatttattgttgctattaccttttttagcagttttctacttgtattccaattacaggagaagaaaaaatattcgacgttttggtgatccggttttactggcccagttgatgcctgatgtatccaaatatcgtccggatataaaattttggataatatttgttgttatcggcttgttctctgtattattagcacgtcctcagtttggctccaaacaggaaacagtgaagcgtaaaggggtagaagttattattgctttggatatttcaaattcgatgttggcacaggacgtacagccaagtcgtctggaaaaagctaaaagattaatttccaggttagttgatgaactggataatgataaaatcggtatgattgtatttgcaggagatgcatttacacagttaccgattaccagcgactatatttctgccaagatgtttttggagtcgattagtccttcattgatttctaaacaaggtacggctattggagaagctattaatttggctgtacggagttttacacctcaagaaggagtgggacgtgccattgttgtaattacagatggtgaaaaccatgaaggcggagctgtagaagctgctaaagttgcagctgaaaaaggtattcaagtaagtgtattaggggtgggtatgcctgatggtgcacctattcccatagaaggtacaaatgattatcgtcgtgaccgtgaagggaatgttattgtcacacgcttaaacgaagctatgtgtcaggaaattgccaaagaaggaaaaggtatttatgtacgagtagataatactaactctgctcagaaagctattaatcaggaagtgaataaaatggcgaaatcagatgttgagtcgaaagtgtatacagagtttaacgaacagtttcaagctattgcatggattattttaatattattgttagcagaattgttaattctagatcgtaaaaatcctttgttcaaaaacgttcacctattttctaataagaaatagctatgcatatgttaagaagtaaatatattttattcactatttttctactatcggtagccagtgtctcggcacagaaagcagagcgtgactacatccgtaaaggaaaccgtttgtttaatgacagcgtatttgtagatgcggaggtgaattatcggaaagctttagaagtaaaccctaagtcgacagtatccatgtataatctggggaatactctctcacagcaacaaaagtttcaggatgctatggaacaatatgtagctgccggcaaaatcgaaaaagacaaaatgaaactggctcatatttatcataatatgggggttctttttcaagctggtaaagattatgcaaaagcagtagaagcgtataaaatgtcgttacgcaataatccagctgacgatgaaactcgatataatttggcacttgcccagaaaatgctgaaagatcaacagcagaatcaggaccaaaatcaagaccaaaacaaagaccagcaacagaagcaagatcaacaacaagataagaataaagacaaacagaatgatcaaaaacaggatgaaaagaaagatcagcaacaacctccaaaatctgaaaagaaggacaatcaaatgtcgaaggagaatgcagaacaattacttaattctgtgatgcaggatgaaaaggatgtgcaggataaagtgaagaaacaacagaaagtgttgcaaggtgggcgtttggaaaaagactggtaatattaagttgacgatataaatttcataagcaatgagaaaactaattattatattaatgacattgatggcatatagcacccaaactttcgctgataaagtgtcgtttgttgcttctgctccggacgtggtggtggtaggcgatcaatttaggctatcgtatacggttacaacacagaaagtaaaagattttcgtgctccttctatcaaaggatttgatgttttaatggggccaagccgatcagaacaaagtagtactcagattgtgaatggtagtgtatcatctactagtagtattactttcacttatatattgatggccaatactgccggtgagtttactgttcctggtgcttcaatagtagctgacggtaatcaaatgatatctaactcagtgaaaataaaagtattgccacaagatcaaaatcataatagtagcaggaggaataatgataatagttcttccatacagccttcgtcgaatgcaagtgtatctaaccaagatttgtttattacagcaactgcaagtaagacaaatgtttatgagcaggaagcgttcgtattgacatataaaatatataccagagaatctaacttacagcttaataatgccaagttacctgacttcaagggttttcattcacaggaaatcgaaatgactacaaatgctcgatggacacctgagcattataaaggtcgtaactactatacaactgtttatcgccaattcgtgctctttccacaacagtcgggcaaactatttatagagcctgcacagttccaaatgacggtaaataaaccagtacagtcagccgatccttttgatgctttttttaacggaggaaacaatgttatagagattaagaagcctatcacaactcctaaaatagccatcaatgttaatccgcttccggctggtaaaccgacaaacttcttaggtggagtaggagagttcaacatttcttcttctatcaacagtaaggagttaaaaacgaatgatgcaataactattaaattagtgatttccggaacgggtaatctgaaacttatttccaatccggaaatcaaatttccagatgattttgaagtgtacgatcctaaagttgataatcaggtgagattaacaaaagaagggcttactgggaataaagttattgaatatttagcaatccctagacatgccggaacatataaaattccgggtgtatcttttagttatttcgatatccgttccaaatcttataaaactctgaatacagaagattatgtaataaacgtagagaaaggtgcaggaaatgcagatcaagttattgctaacttcaccaataaggaggatttgaaagtcttgggtgaagatattcgctatattaaacaaaacgaagtgacttttcaacctaaaggaagcttcttctatggttcaatgtcgtactggctattctatattattccggctcttgcctttattcttttctttataatttatcgcaaacaagcagcagagaatgccaatgtagcgaagatgagaacgaagaaggctaataaagtagcaataaaacgtatgaagctggctggtaaactgctttctgaaaataagaaagatgctttctatgatgaagttttgaaagcattgtggggctatatcagtgataaactgaatattccggtatcccgtttgtctaaagataatattgaggaaaaattgagaaatcatggagtgagtgaagagctaattaaggaatttctgaatgcattgaatgactgtgaatttgcccgttttgctccgggagatgaaaatcaggcaatggataaagtttattcatcttcaatagaagtgataagcaaaatggagaattcaataaaacattaacctagaagagattgtgtcatgaaaaaaatattattttttatattcttatcaatgtcggtaacttgcttcgcgcaagattcactgagcattgaacccagacaaataaacgaagctgattctatccatgtcgatacacatacacttcttgataacaaattggaagatgtgacaaaaactaaaggagattccgcatatataaaagaagattatgcggctgccattcaaatatacgaagcattactaaagaatggagaagcatctgaagtttattataacctcggaaatagttattataaaataggtgaaatagcaaaggcggttcttaattacgaacgtgccttgcttttgcaaccgggaaatagcgacatccgtgctaatctcgaagtagcacgtgccaaaacaatagataaagtagaacctactcctgaagtcttttttatctcatggactaagtctttgattaattgtatgagtgtagatgcatgggccacatggggaattgtttctttcattctactgatagtatctctctacttctttatattttcaaaacagattatgtggaaaaagataggcttcatttcagggattatctttttaataatcacagtatgctctaatctttttgcttcacaacaaaaagaaaatttggtaaaccgtaacgaagcgatagttatgaatccgagtgtcacagtgcgaagtactccaagtgaaagtggtactagtttatttattcttcatgaaggaagaaaggtaaacgtcaaagacaattctatgaaagaatggaaagaaattcacttagaagatggaaaagtaggatgggtcccagcttctgctattgaagtgatataaaaggcattaatagattttatcaattttgaaaaaaaagataagcaaataatttgttttatctttttttttgcttaagtttatagcgtgataaaaaatcacatagtactaaccattaaatttatgagacatgagaacaataacatttaatgaacttcgtaagattaaagattcattgcccagcggtagcatgcatcgaatagcagacgaacttggtttacacgtagatactgtgcgaaactttttcggaggccataatttcaaggagggaaaaagtgtcggaatacatcttgagcccggtccagatggtgggcttgttatgttagacgatacaacagttctcgatcgggctttaaagattctagatgaattgaatatgagtatgcaaaaagaacaggctaccgaatctgtgcaagtttaaaatatagcaaacagaaatcccaattgcgttaaacaattgggatttcttatttgttcaccttcaaaatgtatcaattatggaagacaaattagtaactctagcaattctgacatataccaaagctcagattctaaaaaatgtacttgaaaatgaaggtattgagacatacattcataatgtgaaccaaatacagcctgttgtatcctctggagtacgcttacgaattaaggaaagcgatctaccgcatgcactgaaaatcacagaaagctctgcttggctatcggaaagtatagtaggagagaaggaaacaaaaaaaggagaaaaatcaaataagattttaattccggtcgatttctctagttattcgatgaaagcatgtgaatttgccttcaacctagctaaaacagagaacgcagagattattttgttgcatgtatattttacacctatatatgcatcgtcattgccatacggagatgtattcaactatcaaattggagatgaagaatctgtaaaaacaattattcacaaagttcattctgatctcaaagctttatctgataaaataaaagataaagttgaatcgggggaatttccagatgtcaaatatagctgtattttacgtgaaggcattccagaagaagaaatattgagatacgctaaagagcaacgtcctaaactcatcattatggggacacgaggaaaaaatcaaaaagatatagatctgattggcagtgtaactgctgaggttattgaccgaaatcgtacagccgtattagctattccggagaatacaccattcaaacaattcagtgaggtaaaacagatcgcttttataactaatttcgatcaaagagatttaatagcttttgatgcatttttcaatagttggaagtcatttcatttttcagtatctttgatacatcttgctgaatcaaaagatacgtggaatgaaataaaacttgttggcataaaagaatattttcacaagcaatacccagggcttgaaatccattatgatgtcgtaatgagtgataatctactaaaaggacttgaacaatatatcaaagataatcaaatagatataatcgcattgacttcatacaaaagaaatatattcgctcgattattcaatccaagtattgctcgtaagatgatttttcattcagatacgccgttacttgttatgaacggatgatcaaaagaaatagaattttagtgttttaaacagtggaataataaacagtatgtgcaaataattaagcataaaaaagattaaataatttctttattttcttgaatctttctacgatatattagattatattttatatcctcaatattcataggcggtaaggaatcgtataataacgacattttttgctgccttttttctgcaagttcaagacgttgttttaagtagttttcatcataagtctcaaggtataagtaacggcataattcattagcacgaagacagttatctatatattcattttgtaaacgagtagtatccatagtacgatagtattcgacatacttaggcatagatttaatacatatttgagtaggcaaaaaccaatacttttttaaaattattttttcattatcttcgatatgaaatttatatgtagggtcaagtacctcaacaatagatttacgtttagaaataaggttacacaattcagtatgtgcatcacgaatctgtttaggtaatacaacggaaagagtagggaaatagatacgacgaaagtaaacaggcatagttacagtttgagtataacccgtaaacgggtcagtagcggttatttttgtatcatcaggatgagaacgataatgtgccaagaatctacgagcatattcagcgccaagtccaccatttttgcgagaagtaagaaaaaacagaggattcttaccagcaggcggaataaattgctttttcatatacttcataacataagagatagcgccttgtttacaaggaagacagtaagcaaagccaagagattccataacgggagaaccgtcagtattatattcacctgtgaagcaagtccaacaagattctataaaatgcagaacggaagtaatagtacgaaaatgttcggaatcattagggaagttccaaagtatcatatgataatgtggacgtttagaagtttttccatattcaccaacagcgacataacgaagattatgagaaatgtttaaacggtctagttttatacgtagacgtttaaggaataattgtatttcttctttaaagataccacatttaggcaagtgtttaggattgtatgtaagcgtaagaaaataaggtatagagctagaagtagcattttcacagatagcacgaaaagcccattcacgggattttttatcacggcaaagctcacatttaccacaggggacaagtataaacataggaaatgtttcacctgtatgtttgttaactatgtaataatcatctatattatcagaagttacaccaaaacgataaggactaaattcccatttaggaaaagagtatttataatactctgcaatcgagttagaaatagtagtttcaccgttaggagtaacgtaagttttatatgtagtaagaagatacttaagttgagcattccgaataataacgggattctcacaatatatttgtttcataaattcacggaaggaatacttagagcaattcgcaactgaaagctagatttaaaacgctcatttacaaaggcgtgtcagttgctctatatatatcaagttatagcagacgattttagaagaaatcgtaaaaagcggggtaacagccccgcttaatttacttaagatatccatttgcacggataagaatagtacgaataaaatcaaattcatttctaacactttgcatatactcagcattccactgattttttaaatctaattcaaaattttgactactcaaaagggagcgggtaacagcagcagtagaaagagaatccaaagcaacagtagcactagcacgggaagcggaggcactagcgtttttagtgtttgtatcagcttgaacatttgcaatttcatgtggcaataaatctacaattttcttggcttgaatataattaagattacactcactagccaacttttttatagttgcttcacttaatttagcatccattatgtaacgcaaacgcgctatcgcttggtcagttttaagattagatatcttttgacgtatttcatcaacagcagcacgagattgttcaataaactgatctatctgctgacattctttacgaactttcgctatttgttcatcagtcaattgcatacctttttcagatactttcaaagacatattattcaactgaaccgtaccagagttaagagcatcacgaaaagcagcgtcagactttaatatatcattttggtaatcttgtccaatagcttctttatcagttttattcgcttgactttcggctaattttgcttgagcattcgtcaaacgggtagtagcagcctgtgaaacaatatcgccaatagtacgtttattagcaaggttagaaacatcagtaggttgagaaccttctccagcagtcatttcaggagaagcagcagacaaattttgttgtccgtacgcaaggtcaggattcaaacctgcatctttaaaacgtgccatttgtgcagcaggactattgtaagcgttttcacgattccactggtcaatattccactgattttgcagtttggcaaggttcaaattccaatcacgattcttttggttttcctctttttgggcagaaacctgtttatctatatttttattgccggcaacagcaccggcaatagaactaaaaatagaaagtggcataattatccaaatttacgtttatcaattttatgtgccttaagcactttatttttggaaacctgttcaagttcccaaagttcacacatatcagcggaacgcttaaatacgggttcaatgtcccaagatttagcagaggaaatagaatcaccttcaaggaactgtttctcattcggaagattaacggcaatgcctctatctgtcaaatccttgatattttggggagtaagggcaagattaggtttagtaatctcatagtcaacacctgtttgaagtttacaggtaacaggcttaatttgagccttcaaaattctttttgccataacaataaaatttaaaataaatatttttaggggtatagcaccgcacgcctagcgtgctgatgttccgtcgacggatatcaaggtactagacgttaagaggtgctacgcgcacctaattgtacctctcgacgttcaaacgccacgcaggcttttaccattcggataataacgcacacgcgtataatacgcgcgtacgctataaaacaaactaatccaaacgaggaatagcaacacgggcaataggcagtttacaagtaatgtccaaccaaatttgaccgtaaatcttatccgtagtttcagtaactgcaaacacatcagtaacctgttcagggtcaacagtcaagaagctttgagcaagttgcggtttttggtcaaacacacgatgcataaggaaattgctcaaacttgtacggaacaaaccatgcgcaacatcatatttttgcgcaaactcataccacggtcgattgtaaccaaaggtttcagtaagagagtcaggattatcattatatgcctgaataggacatacctcattatatttaataggctgaaagccaatcaagttaaattcaggctgataatgttccataagaccgcgataagtaaagtgtttcggcaacaattgagtataaacgggtaggggagtgacaataagaagacccattattatagattcttcatcacagaagcactctatatttgcattcgcttcaccacggacaccagcaagaccagcttgtgaaccaagtgccttatcataatcacttgtttgaccttgtacattttggtctactgtttgagtaatactattaacgtcaatatcacgagagacaccgccaaaaaattcgggcataagcaaatcagcataacgtacctttacatcaaatcgaccttctacaatatccttgtaggaatagcctttacgcatattcagttcaagaaatttttgataacaattaaccatacggaggtcgggaatagaaatacctgatgttgcaaggtcatacaatgaacgggcttgacgtacttgcgtaccgttatcaagttctacgtactcaacaccttcaagaccttcatcagattgtgtaaaagaaagtccatactttttaccgtcttcatcaacaagagaagtttttataagttcagtacgtgtaccgtcttcattctgaacggtttgtgtataagtagtaataccaactagaggagcattaccttgttgcggagactgaacagcagttgttaagaaatccttttcccagttggcatattttaattcatacaaagtagtatcagctccaccttcatccgtaggaatccatttattatactgaacttgtccgttcagataatagggattattacggttgtcacggataaatgagttataaataccttcataggcacggaaagcataagcaagaattttttgttgtttagtacccataccagaaaccgaactataccacggggatgtatccaaagtaagttcatgaatcacatcaggattacgaacaagagaagcggaggagcattccaaatccgaactgatagaaacagtaaactgaacgctagaagtaccaccaacagtaggagaaacagtaaaatacttatctctgaatgaagaaaaagtacaagaccatttattaacagagccttcatactgtaaccaagattcaatacccaagaacggtttataagacaaacagaatgtaacatctttaccacgaagagcagcaagggcttcagaagtaagagaagcattaacagccaaatgtccttcaccgtcaggacgaatagcaaacggacaatcaaaagatttaccgtcaggaccgatagcaataacaaaaataaactgattcaaatcactacaatcagtaggttcaccgttaagaacaaactgaacataatcagattgaacaaaagaatcatcaatagtacaatcagcttgaaaatattttccaacaggaataccagtatcaaatgtagcaccagtagaagctggatacacataagtattattattggtaaaaccaagcatagaacgcaactgcatataactggaagcatcaacaataccaggagtaccagcaagcacaccacgattattagaaacatcagcaatataataacccattttggaataccaatgagaagaactcaattccaaaggagttgaagtaccgccataagaaccgacaagagtagtaggtaaaccaagataatcaccaagagaaccagttgaacacatctttttaagacgttcactagtatttatatccaagtaaggttcttccaaaccttcacggaagttaccaacaaagtccttataatctttccaaagagcacgaagaggatagcgaaaccacataatacgagccttcatacgtgtctgaataggaaataccataggcatgaactgcaagccgaaacgaggattcacacgaaacgatgtttttgcaggtaccatatcacagaagataggagtaatacgaccaatctgagtagtcaagttattagcgtgggaccaatcaaaattgttaaccttaatatcattattagggtcaagagttgcatcaaaaatgttttgtgccataattacttttttaatacagggttaatactaagagaatcaacagaagttgtttgctccgtaccttggttcgagttgttattttgtttctgaaccgagagactaagcgtacaagccgaggtaagaatgatagccgcaattgtagtaatacaggtgcagaccgcagtaatgattttgtggatttggtcatttgttagtttcattttattaattgatatttaggattagtaatttgttgataattagcaagaaaaagtttgtcgggattataacgacaaagacaatcacgtaacttttcagcagcacggacagtaggaaattcaccaagaagaaatgtagtaatttgttcttgagaagcacgatagagtacattaatagttactcgcaacaaatattcgggttcttgttttgccattagtcagaaattaaagaagttgtacaaatataattgggaagaagattaaaggaacggactatactacgagcctggacaacagtaataccaaagagggaaaattgattaacaggaatcaacttagtaacacgattaccattagaaagaaccacacgaacataagaaaccgtaaaatcaaaatcacgaagtttctcaaactctgttttcatgttataatattcacactttttcatattaaacattactatatagattcatcaatcttagcaacaaaaacatactcgtattttgtacgcaaatatttagcacgagcacgaataacagaacgaggaacattcatacgagtttcatagaacgtaagagaatcgaggttacaacaacgaataatgtaagagtttaatttttcaacttttgtaggcataactttatagcgttttaattatcacgctacaaatgtgggaataatcaacattatgtttaatagaaaaagggaacaataaataaactttgctcccttttgctgttttttaatgaactcatatttttaaaaagcataaaaaaagaaggcaacttttgtgtaaccttctttttcttcatcaaagaaatatattatttcatcatcttatcaatttcttcgaattccggacccatattcaaattatagtatacacggtaaagaccttgcaaccataaatctttctggtcaggttttaaagctctagctttttcatagaagggctttgcttcttcatagaatttcttcactgccgcttgagcttcagcatacttaggatcattgatatctgttgttgctttatctgcataatcttgtgctttcatcagatacactaaacctacattagaataagcttctgcatattccggatcagcagcaatagcttttttgtagtattcgattgcattatcatactctttcatattatgataaagatatgccttcacatataaatataacttattattaggatcattagttaacatcttatcagcaaattccattgctttagaagcttgattagaagtattataataatcaactagatttgcaaagaaataatcatttcctggaaacttaagaataccttcttccaaagatttaatccatgcagcagtatcacctttagctttataagcatctgccattaactgcatagcaaacttacctccatctttatcagacaatgctgaaggagcgtacttgataatagcatctttatcgcctactctatcagccgctaatgttgcataatatgcaatttgaggaagaagtgtatcatttttagctaactctttatcagccaacatcggataagaagctgattctacataagtagcgaaaaattttaatgcttccttattcttatccaaattgaaatattggataccaccattaatcaaattagggcgttcagccaacatactagaagcatttgctttacgatatttgtttttaatcttacctttttcattaggtacctgagccaaatcgtcgcatttattatagtactcatacatcttcaaaatactgttgtatacttttaatgtatcgtacggttttttcagaaaagcatttttcatttgctcttcgttgatacgcttctgaataaatccagcaacgtcccatgtgtcagcaagatccttagtttcaggattcttcatagcctcttcaatcagctgttcagcttgcttaaaattaggtttcacatcattggcaatgctttttgcttcttttacattcttcatctgagcaaatgagaagctaacagccatcaataaaaccatcgaaaataatactcttttcatgattgttgtttgattaattattaatattatgtctattcttcaatatcgttattactttcatttacgtccgtgacgtcttcagcattcggtgtatctgcattaggatcacttataattgttccttctttttcctcagcaggaatttcatcttcaagactttctgtcattactttacataccgagcctatttggtcgttacgtttctcaagattaatcagacggacaccttgagttgcacgtcccataatacggacatctgctactttcagacggattgtgataccagatttattgataatcatcaagtcattttcatcagttacagatttgattgttaccagtttaccagtcttttcggtaatattcatagtttttacacctttacctccacgattggttttacgataatcttctatttcagaacgtttaccatatccctgttcagaaacaaccattacagattctgtttccaaatctttgatacaaatcattccaactacttcatcctgtccatcattatccaatgttatgccacgtacacctgttgcagtacgtcccattacacgcacagcagcttcatgaaagcgaatagcacgtccgttacgattagcaataatgatctcattgttaccgtttgtcatacgaacttcgattacgctgtcatcttcacgaatagtaatagcatttacaccattctgacgaggacgagaatattgctcaagtaacgtctttttgattacacctttcttggtacagaacaatacataatgattattgataaattctgaatcatctaagttcttcacacgcaagtatgcagttacattatcatctgaatcgatatttagcaaattctgaatagcgcgtcctttggaattctttgtaccttcaggtatctcgtatactttcagccagtagcacttacctttttgtgtaaagaacatcatagtgttatgcattgtagccggataaatgtgctcaacaaagtcttcatcacgagtttctgtcccctttgaacctactccaccacgattttgtgcacggaattcggttaatggggtacgtttgatataacccatatgagaaattgtaataatcatctgatcatcagcatagaagtcttccgggttaaattcttctgaagaataaactatctcagaacgacgttcatcaccatacttggctttaacctctaacaattcatctttcattaccttgcggcatacttcatcatcagccaaaatactttccaaataagcgatttgcttcattatttcttcgtactctgcatgaagttgatcttgcataagacctgtcaactgacgcaaacgcatttctacaattgcacgggactgaatttctgtcaggttgaatcgttctattaagccagcaatggcatcattaggagttttagcagcacgaataatacggattacttcatcaatattatcagaagcaataattaagccttcaagaatatgtgcacgttctctcgccttgcgaagatcgaattcagtacgacgaataacaacctcatgacgatgctctatgaaatatttaattaggtctcttaaatttaatgttttaggacgcccatgaaccaatgcaacattgtttacaccaaaagatgtctgtaaagcagtcattttatagagcttattcagcactacgctagcatttgcatcacgtttcacatcgataacaatacgcataccttcacggtcagactcatcgttggcattcgaaattccttctattcttttatcattaacaagatcagctatatacttaatcaattctgccttgtttacattataaggaatctcagtgattacgattttgtcatgtgtctgtcctgtttcaatttcagctttagcacgcatgatcacacgtccacgacctgtcagatatgcttcacgtaccccacttacaccatatatatacccacctgtagggaaatccggcgctttaacaaagttcatcaactcttctacagtaatctccggattatcgatatatgcgtcacatgcctcaattacttccacaaggttgtgcgggggcatattagtagccattcctactgcaataccagatgctccattcacaagaagatttgggatacgcgtcggcattactttgggttctaccaacgtattatcaaagttaggctcaaaatcaacggtttccttgtacaggtcatccatcattgcttcacccaacttattaagacgtgcttctgtataacgcatagcagcagggctatcaccatccacagaaccaaagttaccttgtccatctaccaagggataacgcattgcccattcctgagccatacgcaccattgcaaaataaacagaagaatctccatgagggtgatacttacccagtacctcacccacgattctggctgattttttataaggtttatctgaagtattacccagttccatcattccgtatagaattctacggtgaacgggcttaaatccatctctaacatccggaagggcacgtgaaacaatgaccgacatggagtagtcaatgtacgatgacttcatttcctcctcgatgttaatctttataattctgtcttgttcaagcatttaaaatgattattaattatacattctacggtttgtgaaaaaccacgctaaagtactacttttccccgatatacgaaagtttttaggaagaaagttttattcttctcatagacatcctaaagctttccttgtaggatctttagctaaactttaaaatacgaaaacaaaatgagaaaaacaataaatgttagaaataaaacaaggctaataacagtaataaatagtctgatatttgttataccttatatataatacaaatacactgtttttatggcacgccatttgtagatataagaaataaagcaaatattgcaatacaaacctgatttaatgcgtatatttgccagtaaataacccttagaagaaaaggaagaagtatgaataatcaattctcacaaagagtttccgacattatcgtctatagtaaagaagaagctaatcgattgagaagtaggtatataggccctgaacacctgcttctgggaatgctccgcgacggtgaaggaaaagctatcgagatattgtctaaactcaacaccaatttagctgcgataaagcagcagattgaagctcagttgaaggcagaagctgatgatatgctattgcccgatacagaggtgccgttgtctaatgatgcggcgaaaatattaaaaatgtgtatattagaagcacgtggaatgaaaagtaacatcgctgacacagaacatgttttgttggcaatcttaagagagaaaaacaatatggcagcttccgtacttgaatcaaataatgtaaattacgtgaaagtattggaacaagctacattgcaaccggatattaattccggtatgggttttactgaagacgatgatgacgaagaagaaatgtcttcatcacgctccggtggcagaggtaatgccgaagaacatcagcaacaagcgcaaaccgcttcaaaaaagccgtctaatgatacgccggtattggataatttcggcactgatatgacaaaagcggcagaagaaggccggttggatcctgttgttggcagagaaagagaaatagaacgcctggcgcagattttaagccgtcgtaaaaagaataatccaattctgatcggagaacccggcgtaggtaaatcagctattgttgaaggtcttgctctaagaatcattcagaagaaagtttcacggattctctttgataaacgggtggtagctcttgatatgactgctgtcgtcgcggggaccaaataccgcggacagtttgaagaacgtattcgttctattctcaatgaattacagagaaaccctaatgtgattttattcattgatgagattcataccattgtaggtgcaggttctgccgcaggctctatggatgcggcgaatatgctaaaaccagcattggcaagaggagaaatacagtgcattggtgctacaacccttgatgaatatcgtaaaaatattgagaaggatggtgctttggaacgtcgttttcaaaaagtaatggtagagcctaccactgctggagaaactcttcaaatattacgcaatattaaagacaagtacgaggatcatcacaatgtgtactacacagacgaggcattagaagcttgtgtcaagttgacagatcgttacattacagaccgtaatttccccgacaaggctattgatgctttggacgaagcaggctcacgtgtacatcttacgaatatcaatgttccaaaagaaatagaagaacaagagaagttaatagaagaagccaagagcaagaaaaatgaagctgtaaaatcacagaatttcgaactcgccgccagtttccgcgataaagaaaaagagctctcctcccaactggatgagatgaaaaaagaatgggaagccaacttgaaagaaaataggcaaactgtcgatgcagaagaaatagccaatgttatatcaatgatgtcaggcattcctgtgcagcgtatggcgcaggcagaaggaatcaaacttgctggtatgaaagaagacttgcagtctaaggttatagcacaagataccgctatcgaaaagttggtaaaagcaattctccgaagtcgtgtggggcttaaagatccgaacaagccgattggtacgtttatgttcttaggcccgacaggagttggtaagactcatttggccaaagaattagctaaatatatgtttggttcttctgatgcgttgattcgtatagatatgagtgagtatatggagaagtttaccgtatcacgtctggttggagcacctccgggatatgtaggatatgaagaaggcggacaattaacagaaaaagtgcgtcgtaaaccatattctatcgtcctgcttgatgaaatagagaaagcacatcccgatgtgtttaatctccttcttcaagtaatggatgaaggtcgcctaactgacagttatggcagaatggtagattttaaaaatacggttattatcatgacttccaatattggaactcgtcagttgaaagattttggtcgcggggtcggatttgcaacacaaagccgtctggatgacaaagaattttcgcgaagtgtcatacagaaagctttgaataaatcattcgcgcccgaatttatcaaccgtgtagatgaaatcataacatttgaccaactttccttggaagctattacgaagattattgatattgagctgaaaggattgtatgatagaatcgaagctattggttataaacttgttgttgaagataaggcgaaagaatttattgctggaaaagggtatgacgtacaatatggtgcccgtcctttaaagcgagcaattcagacatatttggaagatggattatctgaacttatcatatcttcttctttaaaagaaaaagatataattcaagtctctcttaatgaagaaaaaggaggtttggagatgaaagtcgttactcctcaataaaggatttattttcaataagggcacataagatatgccataatgtcagaccttagggtctggcattttttttgtgtttatctgaacaaatatatcaactaaaatcaatcaaatagataaattaaaaaatatacgtattatgcaaaaaggtaatattggggttacaacagaaaacattttccctatcatcaaaaagtttttgtacagtgaccatgaaatttttcttcgtgaattagtatccaatgcagtagatgccactcagaagctaaatacactcgcttctattggtgaatttaaaggtgaactaggcgatttgactattcatgttgaattaggtaaagacaccattactatctccgatcacggtattggtctgactgcagaagaaatcgaaaaatacatcaatcaaatcgcattctcaggagctaatgacttcctggaaaaatacaagaatgatgcaaatgctattatcggtcatttcggacttgggttctattcagcatttatggtcgccaagaaagttgaaatcatcaccaaatcgtatagagatggtgcacaagctgtaaaatggacttgtgatggtagcccagaatttactattgaagaagtagataaagcaggtcgtggttcagatatcatcttatacattgatgatgactgcaaagagtttcttgaagaatcccgtatatctgagcttttgaaaaaatattgcagtttccttcctgttcctattgcctttggaaagaaaaaagaatggaaagatggcaaacaagtagaaacagccgaagataatatcattaatgatactactcctttgtggacacgcaaaccaagtgaactttcggatgaggactacaaatcgttttatagtaagttgtatccgatgtctgatgaaccacttttctggattcatctgaatgtggattatccattccatttaacgggtatcctctatttccctaaagtaaaaagtaatattgaactgaacaagaataaaattcaattatattgcaaccaggtgtatgtgacagattcagttgaaggcattgtaccggactttttaactttattgcatggggtcatagattctccggatataccattgaatgtttcccgttcatatttgcaaagcgattcgaatgtgaagaagatatcaacatatatcacgaagaaagtttccgaccgtttgcaatctatctttaagaatgaccgcaaacagtttgaagacaagtggaatgatttgaaaatatttatcaattatggtatgctgactcaagaggatttttacgagaaagcgcagaaattcgcccttttcaccgatacggatagtaaacattacacatttgaagaataccaaactttgattaaagataatcagacagacaaagacggaaatctgatttatttatatgctaataataaggatgaacaatatagttatatagaggcagctaccaataaaggctatgatgttttgttgatggatggtcaattagatgtagctatggtaagcatgttggaacaaaaattcgagaaatctcgttttacccgtgtggatagtgatgttgttgacaatcttattgtaaaagaagatagaaaaagcgaagtattggaagcaggcaaacaagatgctattacaatcgcctttaagagtcaattacctaaaatggataaggttgaatttaacgttatgacacaagcgttaggagaaaacacagctccagtaatgattacccaaagtgaatatatgcgccgtatgaaagaaatggcaaatattcaggctggaatgagtttttatggagaaatgcctgatatgttcaacttaatattgaattcagatcataagttaataaaagaagtgcttaatgaagaagaaagtgcttgccaggcagaagttgccccaatacagtcggaaatggatgctgtcaataaacaacgtaatgagttgaaagataaacaaaaaggcaaaaaggacgaagatatcccaacctctgaaaaagacgaattgaatgatttggataagaaatgggatgatctgaaaagtaaaaaagaagctatttttgttggttatgccagcaataataaagtgattcgtcaacttattgatttggctttgttgcaaaacaatatgttgaaaggtgaagctttgaataacttcgtaaagcgtagtatcgagctgatttaatatcgcccctttatccattatataacttcaggaaagagcattcgacgttaaaacacgtcgtaatgctctttttcgatttaaaacggttgataaaatatcgattaattgaaaagtattgtatatatttgaacgtttaaaaagacaaaagttcaactgtttgatttgggttatgagaaaaattcttcttgtgtttattactttatggctaatcgtaccagctatctatgcccaaaaagtaggtcttgtattaagtggaggcggtgctaaaggattgacacacattggtattattcgtgctctggaagaaaataatatccctatcgattatattgcaggtacctccatgggggccataatcggttctctgtatgctatgggatattctcctgatgacatggtagaacttttaaagtcagaagactttaaaagatggtattccggagaagtagaagagaaatatgtatatcactttaaaaagaatcttcctactcctgagttcttcaatattcgtttctcctttagagattctctaaaaagtttgaaacctcaattcctgcccactagcgtcgtaaatccaattcaaatgaatctggttttcgttgatctgtacgcacgtgccactgcagcatgtaaaggtgatttcgacaaactctttgttccttttcgctgtattgcctccgacgtatacaataagaaacaattaatcatgaaagaaggcgatttaggagatgctgtcagagcatcaatgagttttccgttcatgttcaagcccatcgagattgataacgtattagcctatgatgggggaatttataataattttccgacagatgtcatgaagaacgattttcatccggatattattatcggaagtgtcgtttcggctaatcccactaaacctaaagaaaatgatctcatgagccagattgaaaatatggtaatgcagaaaactgactactctattccggattcaatggggattttgatgacatttaagtatgataatgttggtcttatggattttcaacgtgttgacgaattacatgatataggttataatcggactctcagtatgatggattcgataaaaagccgcatacatcgacgcgtaaatcttgataatatacgtctaagaagaatggtctaccgaagtaattatcctgaattacgattcaagaatatcattattgacggtgccaacacacaacagcaagcatacataaaaaaagaatttcataaatcagataacaaagaattcagctacgaagacttgaaacaagggtatttccgtctactttcggataatatgatttccgaaattattccacacgctatctataatccggaagatgatacttacgatttgcatctgaaagtcaaattggaaaataattttgccgtaagattaggaggtaatatatccacatctaattccaatcagatttatctggggctcagttatcaggatttaaattactatgccaaggaatttgtttttgacggccaacttggaaaggtatacaataatgcccagtttatggctaaaatagacttttctactgctatacctacttcatatcgcttcatcgcatctatcagtactttcgactatttcaagaaggataaacttttctccagaaatgacaaaccggcatttaaccaaaaggatgaacgattcctaaagctacaagtaggcctgccatttctttcaagcaaacgggcagagtttggaatagggattgcaaggatagaagataaatattttcagaaaagtgtaatagactttggaaacgataagtttgataaaagtcgctacgatttgtttggtggttctatcagttttaacggaagcacattaaactcacgacaatacccgacacgtggttatagagaagccctcattgcccaaattttcattggaagagagcgattctatccgggagaaggtgctactggaaataataataaggagcaccactcctggttgcaattatcctatatgaaagagaaataccacaatatgagtgaacattgggtgttagggtggtatttgaaagcattatatgcctctaagaatttttcagagaactatactgcaacaatgatgcaggctggtgaattttctcccacacagcatagtaagctcacttataatgaagcatttcgtgccaaccagtttgttggtgccggtatccggcctatctatcgtttaaaccagatgtttcatcttcgaggagaattttatggttttatgcccatttatccgattgaaagaaattcattgaataaggcatattatggaaaagccttctctaaattcgaatatttaggagaaatatctgttgtgtgtcaattaccattcggagacatctcggcatatgtaaatcattatagctcaccgaaaagagagtggaatgtcggactgagtattggttggcaactattcaattaccgattcattgaataaattttctacaaaaaagtcgttgaaatgcttgctaattcgggaaaagtacgtatctttgcacccgttaaaacgaaacaatggtcgcgtagctcaactgaatagagtagctgactacggatcagccggttacaggtttgaatcctgtcgcgatcacttatcgaattaacaaaatggccgcgtagctcaactgaatagagtagctgactacggatcagccggttacaggtttgaatcctgtcgcggtcactcttcaaaactattattaggtcgcgtagctcaactgaatagagtagctgactacggatcagccggttacaggtttgaatcctgtcgcgatcactgaaatcctctgcatattatgtggaggattttattttttgcccatttcatcgaagaaaatgtatcttcaatcctggaaaaatcacggatcaatgaataaccctgagggttaaatatataaattgttatctttgtctccaaattaatagcttatgaagttaaatggttatcaccttcttcttcctgaaggaactttggattactttgatcttgttgatgtgaaggaaagcatgaatgaagttatcatttaccttgaggagaagaatcagctccccgagaagtatgctggtcaagaaacagagagtaaagggttttatgagcctgttgttgttcaagactttcctcttcgtggcaagaaagtctttttgaacctccgtcgtcgccgttggattttgaaaagcagcaatgagtatatttcccgcaattggcgtatggtggctgagggtactcgtttgacgcaagactttgcgtcttttttaaaagaactatattgataattatccgatcagttgcaagttattgggtactttatatggcgttgacggggatttgttggaacgtcaataccgcaaccatttaagtaattacctacactgggatcagcttgctcacgcagagaactggctcctgtttgagaagaacattggtgcctacgtctgtattgacgaagtggctctttcccgtggagaactctatacagtgttgattaataaagagactcacggtggtaaaggcagtattattggtatcattaaaggtacggatgtttgcacggttacctctgtcctgcttaaactttcgcgtcgtcgccgctaccaggtgcgtgagataacattggatatggctcccaatatggaacagattgcccggacttgcttccctgctgccaaacgggttacggatcgtttccatgtacagaaattagcgtatgaagcggttcaggagatgcgggtgaaagctcgctgggaggctttggacgaagagtccatacagatagcttacgccaagacctgcggaaagatgtatcatgcgcccgttttcgccaatggagatacaagaaaacagttgctggcaaggagtatttatctgctttacaaaaaagaatctctatggactcagtctcaaaggatacgggccgagattctatttaaagaatatcccgatataaagaaaggatattatatggccatgcggttaggatcaatctatcatcagtgtaagtttaaagatatagctttgacaaggcttgcaaggtggtatgatgaagtagacaaagcggggtttctcacctttggaagggtagcgcgctcgatacaaacgcactatctgaatataataaacttctttgaaagaagggctaccaatgcagcagcagaatcatttaatgctaaaatcaaagcgttcagggcacagttcagaggagtaagagataaagcatttttcttgtatagactcgctaaattatatgcataaaatgaaaatccctcagattcttacgttgatccaaaatcacccttcacattactctatccatcgtgatagaattaaagtgaagggtgattcatttatatactgcaacaagaatcggttttccttgtattagcatttaatatttaactcgttcaagaccttacgtatcgcttcaaacgtagtaattcgagtaggaaccaatggcaaacgaagcttattttcaatcattcccattgcgttcaacatagattttactcctgcaggattcccgtctacaaataacaggttaaataattccgtaaatttgtgatgaatagtcagtgcattagcaaagtctccttgtagtgccaaacgcgtcatacgactgaattcgcgaggaaaagcgttgccaattactgaaattacgccaacagctcctaatgtaatcaagggaaacgtgataccatcgtctccggagataacattaaaattttccggtttattttttatgatatcatccatttgtgtaatattaccggatgcttccttaatggcaataacattattgaagtcacgtgcaatgcgcaaagtagtctcggcggtcatatttactcctgtacgtcccggaacattatacaatacaataggaagttccgttgcttccgcaatcgctttataatgttgataaataccttcttgggaaggtttattataatatggcacaacagacaatatagcgtcaactcctgtaaaatcatcgtttttcagagtttctacaatggcgcgagtattattaccacctacccccaacagaataggaattcttccgttaacgcggtcgattaccattttttttatggttttcttttcttcttcagtaagagtcggtgtttcggccgtagttcccagcacacacaagaaatccgcattattctgcaagagatagtctaccatgcgtatcagcgcgtcatagtcaacgctctcatcctctttgaaaggagtaatcagtgctacccccattcctttcaatttagtctgtatcatgagttttaattataatctctaatttatttagccgcaaaagtacgaatatttttcttatcttacgatataagtttcagaaattcgtcctcgcttagtatggttattcctagtttttttgctttttccagctttgcaggtcccatattctctccagcaagtataaaactagtctttgcagagatgcttcccacgttctttccaccattcttctcaatgagctctttatattcatcacgcgaatgatgagtaaatacgccgctgataacgatagattgtccggcaagtttatccgtatattcgcttaagtcctcctcggtacgataaagttgtaatcctgcagccttcaatctgttaattagctcacaatttgactcattagcaaaatatgaaaggatactttgagctattttttcgccgatttcatcgatacttatcaatgtttcaagatccgcctgctgcaattcatctatattctcaaatgacttggcaattttcttcgctactgtttcacccacaaaacgaattcccaaagcaaagatcacacgttcaaaaggaacggctttactttgagcaattcctgttatgatattctcagcagatttctcacccatacggtccagtcctttaatattttcaactgacagatcatataaatcagccgtattgtgaatcaatcccaatcgatagaacatatccactgtttccggccctaatccatcaatattcatggctttccgactaataaagtgctctattttacccttaatctgaggagggcatgctgtttcattagggcaatagtgggcagcttcaccttcatatctcaccaatttgctattacattcaggacaattagtaataaatctgaccttttcacctaacataaaactacgcgcgtccttatccactccggtaattttaggaatgatttccccacctttttctacatataccatgtctccgatgtgcaaatcaagcccctcaataatatctgcattgtgcaatgacgcacgtttcacgacagttcccgaaagttggaccggatctaaattggctacaggtgtgactgctcccgttcgaccaacctgataagtaactttatttagacgagtcagcgcccgttccgcttgaaatttataggcaattgcccacctgggagattttgctgtgaaacccagattcttttgctgtctaagactatttacctttaaaacaataccatcagtcgcaacaggtaaatttttccgttcaacatcccaataattgataaattcaaagacttcttccagtgttttgtatttacgtgtcagatcagaaatcttaaatccccattttgctgcttcctgaagattctcataatgcccgtcgcaaggcaaattatcgcccaacaaataatacaaatacgcatccaacttacgagaagctacaatcgctgaattttgaagtttcaatgttccggacgccgcatttcttggattggcaaaaagaggttcttcgcgagcttctttttcacggttcagctcctcgaacacttcccatggcataagaatctctccacgaatctcaaaagaagaaggataattatcgccatgcaatacaagtggaatagaacggattgtctttacattatctgtcacatcgtcacctttttctccgtcaccacgagtgacggcacgaactaactttccgtcttcgtaagttaacgaaatggatgttccgtcgtatttcatctcacagcaaatctcaaaatcttcattcaatgctttgcgaacccgatcataaaaatctgtcacttcagcttccgaataagtatttgccaaagataacataggatatttatgtgctacctgcgtaaaattcttatttatatcactgcctacacgcattgtaggcgaattttcatctttatattccgggtgagcctgctccaagtcctgaagttcacgtatcttctcgtcaaactccttgtcggatatttcgggagcattcaacacgtagtaattatagttatgccgatgaagttcggcacgtaatccttctattttctcttttatatccataattcttagattgtttaaggcaaaaatacaggtttctctttgaatatttgtacttttgcgaaaaattaaagattatgcgtattgatattataacggttttgccagagatgattgaaggctttttcaattgttcgataatgaaacgagctcaaaacaaaggacttgcagagattcatatccataatctccgcgattatactgaagataaatatcgtcgtgtagatgattatcctttcggaggatttgccggtatggtaatgaagatcgaacctattgaacgttgcatcaatgctttgaaagcagaacgtgactatgacgaggtgatttttactactcctgacggagaacaatttaatcagcctatggccaattctctttctttggctcagaacctgattattctttgcggccattttaaaggaatagattttcgtatcagggagcatctgattacgaaagaaatcagtataggagattatgtattgacaggtggtgaactggcagcggcagttatggcagacgctattgtccgcatcattcccggagtcatttccgatgaacagtctgctctttcggattcatttcaggataatttgttggcagcaccggtatatacacgaccagccgattataatggttggaaagttcccgatatcctattgtccggacacgaagccaaaattaaagaatgggagttgcagcaatcattagaacgtacgaaaagacttcgtcctgatttattagaagaataacttgattgtaaaaatacatgcaaataaaaacgacggtggaaatggattgagttttcaccgtcgttttttatttatgacctgttcaaggattttatttaattttcctcatacgcattttttcttgataattcctttatttaaaaagactctttcaataagtatatgttaaggggaaaataacacttattcatgaaaatttatgcgaagggttatcatgtgttttcaattatacctcaagtgcacctattatttctttcacagacttacatccatgtctatccaagtaattatttataccttctgctactttaaccgtaacagctggatctatgaaatttgctgtaccaatctggatagctgacgcaccggcaagcataaattcaacggcatctttccagttcatgatacctcccaatcctatgaccggaatatttactgctttagcaacttgccaaaccatgcgtaatgctatcggttttacggcagcaccggacattcctccagttacagtcgacaggataggacgtttacgctctgcatcaatggccattcccagcaatgtattgattaatgacacgctatctgcaccactttcttctgctgcacgggctatttctgtaatatcagtcacgttcggagagagttttacgataagtgtctttttgtaagctgaacgtactgcttttactacttcagaagctccttttgctgacacgccaaaggccatgccaccttgctttacattagggcatgagatgtttaactctatggcaggaattttgtcaagttcattaataatttcggctgttttcacataatcttcaatggcagatcccgatacgtttacaatcatattcgtccggatgtcttttatacggggatatatatgctctacaaagtaatcaactcccttattttgcagtcccacagcgtttaacatccccgaaggagtttctgccatacgcggatatgggtttccttcacgtttgtgaagggttgtcccctttacaatgataccacctattcgcgctatatcaatgaaatcagagaactcttcgccatatccaaatgtacccgatgcggtcatcaccggatttttcatttgtaattcaccaatatttacacttaaatctgccatagtagtttatttatattaaaaacaggaccttctttacatacacacaagtgaccttctgtcgtgttctccacacaacaaagacaggcaccgattccacaagccattgtgttttccaaagagacttcacattctatttgattacttttggcatattttgccaccgctaccatcatcggcttgggaccgcaagtataaatctgttcaaaacgcaccttatttaatatggaatgttgggtaacatatcctttttctccgtgactgccatcttccgtagtagtatacacttcgccatatttaacaaattcttccagttgcaacagatccttatcactacgtgcacccaaaagaaaggtaggtttatgaccattcttagccaattgctcgcccaaatacaacatcggtgctgttccaacacctccaccaactaacaaaagcttatctgaaggattctgaggcattgtatagccatttcctaatggaagtaccacattgataacatcacccggatttacttctgccaatcgccttgttccgtctccaagcaactggatgagaaaccacacttcgtttcgctgtttgtctacaaaattaatagagatagggcgacgcaagaatgtagtaggcgaaccgtccacccgaagttcggcaaactgtcccggtagcatttcgggcagcaatgactgagaagtcaactttagcaatacatagttagcatgcagtttgatattctcagtaaccgtcagatctaaaataaatttcttcatgtatggatataaaaagtataaattcgtattccgggtacaaagatacaggaatttgctcaaacctgcgattttaccacttatttttcaggtctaaacgtttcataggtattatcatcaaagaaaattcttatttcagtaattttcctggcaggcttttctatatacctaatctcttgttttacaatctctttaggtgtatttccggtacttcttaatgccatttccttgcgattttccaaagtaatcgtctctttggacggatttacaggattctcatcaaacaaagaaggttgataatcaccattagaggaaaccaatgaagattcttcagcagaagccaacatttcacctcttccatatagtaaccattcaagatttacgtaattataagtctggtgaactttcattactacttccaggcttggtttgttccggtcatttaaaatatgtgagagagtagattgctgaactccgattgtttcagcaaaaactctgggaggaactttttctctctccattatcatcctaattctgtcttttatttccatatagccttttttgattacaattgtgtgcataacatgctgatttcacaaaaatacaaatcctttatgtgaatatacaaaggtaaatattttgtttcacaaatacaaatcacaaatctaaaaatatagatatgacaaatgtgtgtatttgtttactgatgtattagtatgtttgtatactcataaaaacactatctttataaatcatatttcaagtttaataaaaagtggtaaataactaattatcaattatatattattcgtaatttatttattgattttgttattcacaaaaatacattgtgtataatatagtctattatagtaaaaatttagatatcacatgcatattactgataaacaggtgtataaatgcgtaaaaataaagtgttaacccctctcctttcacctttatactactttatttattcttgtaatttacatcatatacttttgtgtatagcttcttctcgttacacttgtgtttgcattacaatattatatttcacaaacggaaagtgtaagatacacaaaagtgaaattgagtagttgcatcagcaataaaacaagagaaaaaatctataattcacccatgtatatcgaacgcttttcaaatcatcttttacatgtcaggtctaaaatggtaaatccttgcaatatttacgtactcttcacctattctctactttttttcaattctagaggccttatttttatcataataatctataatacagagtgttattcccatttttatgatattaatctttagataaactagaaaaaaatggggagattattacagaaaatcataaaactatcaaaatgacagaccaggttttaaacaaaaggaagtttctctttcgttttcgcttaaaaaatcaagaggatattatatacattacaagttttgatttaatcttgatttttcaatgggatttattaaaagagacaaaattcgggaatcaagtaagatgaaaacaaaacgggaaaagtaactcagaaacacatatcttctatcaggaaaaacagataaagaaagtgtggtaattttgtaaaatattcagtttaaaattaggatgctaactattcatttggaaggttcaatatagagaatataataagaggtatatacttacttgaatgacagtaaaagtatatacctcttatcgatgtgaaacagtcgctttttctaatgaagaattttaaacactaattcacgcagaatatctccgtccgacatggaactatttttcactccttttgattttgcatcagcatatcgtatttctccaacgatttgcatcgtcttaactccgctatatttacgcattgccgccatataatctttagcttgccagggcgttcttagtcctaacattgtagcgattccctgctccgatttgtcaggagcataatatgccaacattaagttggaatagaaactaaacagcagagataatgtcatttgaatcgggttagttttcggattctcctcaaaatattttattattttatttgctttaagaatgtctttttccactagtgcacttcgcaattcaaagttattataatccttgctaatgccgatattcttttcaatctgttcgggagtaacacgtttctgtcctgcgggtaaagtaataatcaatttctccagttctcctgtcagccgacttaaatctgagccgacaaaatcagcgagcatgactgttgccttgggttccatgtctacgcctttccgtttcatgtaagaagcaatgaaggctgggagctgtgcatcttttatctttttagattcaaacagcacacccgtcttttcaacttcggcggccaacttctttctgcggtccaatgtaccatgcttatggcatattaccaagatagttgaatgaagcggcttctgaagatagtaagacagttcctccatgttacgcactgcttgtgcctccttgactactaccacttgatgttcggacatcatcggataacgcttggcagcatttatgatagtcgctacatctacatcagccccgtataccacagtcaggttgaattccttttccgtatcgttcaacacattatcagtaatgtaatcggctatcaggtcgatatagtacgattcctctcccattaaataataaataggacgatactgctttgcctttaattccttgaggatatcatcacaggtcagctcttgttttgccatatatatttttcagaaagaccgggtttaccagtcaaatttcaagtgtttaacagttttcttttcatcaataatcatacgcagagaagcaataccgatttcaacatgctcctctacataatttctggtaaccaaattatcactcttatctgtttttactccgtcgggagtcataggctggtcagatactaataataatgcaccggtaggaatgtggttggcaaagccacaactaaacaaagttgcagtttccatgtcgaccgccatagcccgtgtctttttcagatattccttgaatgcatcatcatgttcccaaatacggcggttggtagtatatacggtaccggtccaatagtcgcggcctttgtcacggattgacgaagaaacggcacgctgtaacataaatgcgggtaatgcaggaacttcaggaggaaaataatcgttggaagttccctccccacggatagccgcaataggaagaatcaagtcgccaagctggtttttcttgtcgataccgccacattttcccaagaataaacacgctttgggacgaatagcccccagcaagtccatgatgatagcagcgttgggacttcccataccgaagttaatcattgtgataccttcggcagaagcagaaatcatatttgcatcccttcccaaaataggaacattaaactgatttgcgaaaatctcgacatacttgttgaagttagtcaacagaatatactctccaaaatcctccaggttacgttttgtgtaacgaggcagccaattagctacgatttcttcttttgttttcataattatctattaaatttgtgctcccgatgatgggaaccattatttaacttacaaaaataataaatgttatcgttaaacctaccagtattcgacactaaaataaacgtacgaaacggaaaaaatgtaattttcgacgtgattcgcaaacgatatgtcgctctcactccggaagaatgggtgcgtcaacacttcgttcactttcttattgcacacaaaggatatccgaccgcccttcttgccaatgaagtaatggtaaagttgaacggcactaccaagcggtgtgatacagtgctctatcgcagggatttatcggcacgcatgattgtggaatacaaggcaccgcacattgaaatcacacagaccgtattcgatcagataacccggtataatatggtactgaaagtagattacctgattgtcagcaatggaatgcaacactattgctgccgaatggattatgaacaccagagttatattttcctccaggatattccagactataataacttataaaaaagagtgtcgctatccggtcacgatagcgacgctatgtaaagcacataccgtcactatcacatccatctaccgacaccctgattcagtcgtcttccggatactttccggatagtattctatctttacatactcccttcctgcttatcgttatttccttttttcttactgaatttctcctgcaatttctgcattaattcatagaagttaggtatataaaccgttgccagcagtgtattcattgccataccaaaaacaacggcggcacctaatgcaatacggctctgtgcacctgctccagaagcaaataataacggcattactcccaatacaaaagcaaaagacgtcattaggataggacgcaacctgacgtgtccggcttcaaatgccgactcacggatagagttaccctcggcatggaagtcgcgggcaaactccacaatcagaataccattcttggcagaaagcgcaacaagcaagataataccgatttgagtatagatgctgaccggagttcccattaccagacagcctatcatagctcccaataatgctaccggcaatccgataacagccgccaccggactcgtccagctttcatattgtgcagccaaaaccagaaaggcaacaatcagagccattactaaaacaatggtagttgtattcccggcctgcgtctcctgataagcaacggaagtccattcataaccaaattcatcgcccaactgttccttgaacaatgcttccacttcttgaatggcttgccctgtgctacttcccggagcgacattgcaagtcagagaagcagtcgagtacatattataacggttgatctgatcctgtcctaactgttcctccaccttggtgaaagatgaaaaaggcaccatttctcctgccgcattgggaacactcagtttcaagacatcatcaatcacccgttgcgcctggtcgcgcgcctctatcttcacttggtagatacggccgaattctacaaaatcatttacatacgccgcacccatataataacttaatgtagagaatacatcattcaaagcgatgcccataaactgtaccttatcccggtcgatattcagaaaatactggggaacgtttgcctgatactggctggagacggaagctaaagccggcttggaatgataagaggcaagcatggcattgatagcctgctgcatttccgtcggtcccagatttctccggtcttccaactgaagctgtaacccgccggacgctcccaatcccggaatggcgggaggaaccatggcaaacacagtcccagcctgaatcgtcatatacgcttcgccattaaagcggttgacaacagcggctgccgtatgctccttccctttcctttcactccagtttttcagtacaacgaaataagtggccgagttactttgttctcctccgcccatgacggaaaatccggaaattccaatataattctccacttccggatacgaatctagaatccggttaatcttgtcgcctaccgcctgtgtacgttccagactggctgcgggcggaagttggacaaccgcaataaaatacccgtcatcttcatccggaatgaatgtagacggccagtgcataaagagcaacacggcaatagccgtcaatatgccatacgacacaagagccattccgggacgtgccaacaaccatttgactatcttatcatacgctccctgcgtcttatcataagccttgttgaatcctttgtatatgaggaagttagaaggcttgctcttttccagaaacaacgcacagagagcaggtgtcaatgtcagggagttgaaaccgctcaatacggtagaagctgcaatagtcagcgcaaactgtttgtataattgtccggaaattccactaatcagcatagtcggaataaataccgcaagcaacacaagcaccactccgacgattggtccggtaatttctcccatagctttcgtcacagcttcacgagttgaatattgtcccgtttccaacaatctcgaagcgttctccaccaccactatggcgtcatccaccactatggcaactgccaaaatcaatccgaacaatgtcagtgtattaatagaaaagccgaatgctgccattaccgccagtgtaccaatcagagacaccggaatggtaagacaaggaataatcaccgccctccagttctgcaaaaacaggaaaatcacaagtatcaccagcagcgttgtttcaaagaaagtaaccataacttcatcaatagaagcatgaatcacatccgtagtatccaacgtaacattataagacactcctgccgggaagttggcggccagttcctgcatcttggctttcactcctttcgagacatccagcgaattggaacccggttgctgataaatagcaatagccgccgtaggctgccctttcaatcgggacaccacactgtaagaagcagatcccagatcaatcctggcaatatctttcagacggagcatggccccatcctgttcgcggtggatgataatatttccgaactgttcgggagaactgagccgcccctgcacattcagtgtatattgaaaagcattcttattctcttccccgataggctggccgatatatccggcagatacttccatattctgcgactggatagactgataaacttgttgcggtgaaatattccggatacgcattgcttccggatcgagccagatacgcatggagtaatcccctgctcccattacattcacggcacccactccgggcacacgtgtcaactggtcgacgagattcaactttgcataattggtcagatacagactgttgtaaacagaatcctgtgaggtcattgtcaggaacatgacaatattcgatgattgtttctgtacagtgactccctgcaccactacgggttcggggagcgatgattgtgcgacgcttaccctgttttgtacctggacggttgccatatcaatatccgtaccgacggcaaatgtgatcgtcagagaataggctcccgaagaagatgaattagaggacatataaagcataccgtctaccccgttcacctgctgttcgataggaatacctactgtttgggcaacggtttcggcatttgcccccggataaacagcagatacctgtaccgttggcggtgtaatctccggaaattgcgctaccggcaatatattgagtgtcaccagaccggctactacaatcagcaaggcaaggacggtagcaaatatcggtcggttgataaaaaacttagaaaacataagattatagtttaggattaatattcagtttacggcatcggttttatcttcattccgtccctgaccttcatcagagccttcgtgacatacctgtcttgtggagaaagtcctcccgtcacttgccgtaaagtatcacctatcaactgccctatctcaatatgccggtaacgaacaatgttagaatcattgacaagatacaagtattttcccaactggtccgtcccgatagaagcctcttttaccaacatggcattatcggcttctccatacggtaacgtgatacttacatataatccgctctttagtatcccttgcgggttgtcaaagttggcacgaactgtcaacgttcccgtattcaagtccacgttcggagacagataatccagtgtggccggatacatttccgaaccttccttgcccaactgaaccattattttcttcggaagttcctgtgcactttgccggttgttcatcaacatttccagccattggttgtcagctacattgaaatatgcgtacatttgattatccttatagatagtagccaaagtgacaggctgcaacgaaccgcccacatagctgcctacatcaacagttgctttactgatcgttccgtcaaacggagcgcggacatagcaatagctcagattcgtatgggccgtgctcaaagctgcttccgcattattgaccgccgccacaccttctgccacggaagattccgcttgaagtacctgtatctgactcacggcatcgcttttgacagcttctttcatacggctgtaattgctgcgggcatattccaactgggcttgggccgtttttagtgcagcttccgcctgttccaccttatccttatataaggtaggttcgatgacaaacaataattgtccttgtttcacccgtcctcctgcagtatacgaagtcgattgcagcgttccgttcactctggccaccaggtttacagtcttttccgttgtcagatagcccggataatctttcgtcagagttacattctttattattggtttagctacgctaatttccggagttggcatccctcccattgctcctgcgctttttttctccttgcaaccggtcaatatcggcagcgcaaagaaaatatacattagttttttcatatccgttacgttaggttatatttttatttatagattctttattcttgccaaccgcctcccaaagccttgtagagagttatcaactggagtagcgaattcccctgtgcctgtaccaactgattctcataggacaacaaagaccgctgtgcatccaacacattctgaaagggagaaagcccctgtttataaagttccaatgaaagtttcagtgtctcaattccctgattgcgtacttcgcgcagcgctacaatctgcttgattgaattccggtaagaattcattgcattatctgtttcctgtacagcagtcaggacagtctgattgaattggttgattgattcgtccagttgggctttagccagtcgtgtagcattaaccaactgccctccgctgaaaagcgtccaactcattgacggtgcaatctcatacatcatgcttttactctttgtcaagtctttcaagtcacgagccgcataaccgaacgagcctttcagaaaaactttcggcaaccagtccgcctttgaagctccgagcaatgccgcttgtgcgtttacgcttcgttccgcactccgcacatcgggacgtctcatcaacagatcgacaggcattcccacgccgatcggttccatatagtcgggcaatattccgacaggttccagtaccggacgaatgtcctgcggatacattcccagcaaaactgctaacatcgtaatatactgattgataccggcttccagttgtggaatggaagcttttgtgctatataacacagacttagcctgtgcgacatccagcttagccactaatccagtgttataccgtacttccgtgattttcagtacttcttcctgagaagcgcagtttttattcacaacttcaagttcctgttgcagttccctcaaattgatataggccgaagccacttccgccgccatagaaatcattactccggtatattcctccttactggcagcaaagttctctttctgtgcctttacccgtttgcggatactaccgaacacatcaatttcccaactcatgctgagtgatgcatcataataatgttccgtagtttggggaattgagcttgtatttccacttgtttcctgtcgggtccaaccggcattcaatccgattgaaggaaagaaattgccacgttcggcccaaaggttggcacgggcagcagcgatgcggttaattgccattgcaacggaatagttacggtctaccgccaaagcaatcagagaatccagtttgctgtccccgaaagatttccaccaatggtcgtctaccggaagtgtctgttgaaacacttccccattttcttcccagccgttagggagaggagctttcaaatagcggtttgcagtttgcccaaccgcagtcacagttgaaagaaacaaaaggagcgatatgctccatgctcgtatgttcatattcagttcaggtttttatgaaatgaaaagataacaactaaagggtgagtttgtttaccggcgtaacgacagaacaaagtttctattcagcgtgatgttatcttgggtacgagatccctgtttatacggacactgataaaaaaagccctgcattgttgcagggcttcctatattaaacagtaactttaactacttgttaatggatgacttctcttattcagcagtttttcttctgatagctcttttagtagttggtgccggagcttcttctaccttgtgctcgatttgtatgccagccaattcagggtcaatcatgatgcgtccgcaatattcgcaaacgattaccttcttacgtgaacggatgtccaactgtctctgaggcggaatcttgttaaagcaaccaccacaagcgtcacgctgtacgtatacaatacccaaaccgttgcgggagttcttacggatacgcttaaatgactgtaacaagcgcggttcgatcttagtttccaggtctttagccttgtctctcagtttttcttcttcctgcttggtttcagaaatgatttcgtccagttcgcctttcttctgttcaaggtctttctgcctttcgtcaagcaccagttcattctttgctacttcagcctctttttcttctttatctgcagaatactctttaattctcttttcacaaagttcgatttccaatgtctggaactcgatctctttggtcaggaagtcgtattcgcggttattgcgaacgttgtcctgttgcgacttatatttttctactgaagatttagcagtttcaatttccaccttcttgccggcaatagcaactctcagttcctccacttctgctttgatcttgtcgatacgagtactcaaaccagcaatttcatcttcaaggtcctgtacttccaatggaagttcacctctcaatgttttgatttcatcaatcttagacaacatcgtttgtagttggaacagcgtcttcaacttctgttctactgtcaactcattcggatctttttttgcttctctagccattttacttacaaatattttatgggattcgtatttattttactcaattggagcgcaaaattaggaaataaatcccggattatggaataaaaaatttcttttgtatattgttcgctttcgtaatgaccaatttccgtcatcaggatttccccttcgtgaccgaaataatcatgatactttatctcacctgtaataaaaacatccgctcccgaccggattgcctgtggaagcagaaacgcgcctgcacctccgcatagtgctacttttcgtatttccctgcccgtcaacctattatggcgcagacagccaacctcgaaggtttttttgatacgtttcagaaattcaagttcggtttccgattcatccagttcaccgataattcccgagcctgcctgtgtccagtcgttctgcaacggataaatgtcgaacgccggttcctcataaggatgaacggccagcaaggctctgacgactgccgattttttgaatgcagggaggatagtctctatccttacttctccttcacgatgcaattcgccgattgccccacagaaaggatgcgttccctcctttgcccggaaagtcccctctccttctaaattgtaactgcatgaatcatagttgcctatgtttccgcatcccgcagcaaacagcgcttcccgcactgcatcagcttgcgtattaggaacaaatgtaaccaatttaatcaggctattctccttcggttcaagtactttcagattcttcagtccgattttttcggctatcttataattcactccgccttgggcattatcaagattggtatgtgccgaatagatcacaatatcattctttattgctttcagcatacagcgttccacataatctttgcccgtaatggacttatatcctttaaaaatcagcggatgatgtgatatgacgagattgtatcccaacgcgatagcttcatccaacacagcctcggtgacgtcaagacacaacaaagcccctgctgcttccgcatctgtcaatccgatttgcaggccggcattatcgaaaccgtcttgcaatggcagaggcgcgaattgttcaagggcgcttactatttccttaattttcattattcgtagaaaatttggttgcaaatataagaaaataaaagggaacaaacactctttgttctcatttttttagtaaatttgtcgcctatcctataattattgaacacgatgaaaacaattttattctattttctactagctattttggcagtttcctgtcaatcgaaacagagcgagaataccgaaaaggaagtttccgacaacgtaagtaacagtgatactgaagaatgtattgcggacacaataagcgccaccgctatcttctggatagataaagcggagacaaaacattgcaaagaatggggattccgtactgttaaagcaaaagttctcattcatgaaaacggaaaggtcgatttagaggctttcgtcaaaaaacaatcgccggatatggagaagtatgtacggcatcatctcgctaaatttcaagtatcagaaaaaatgttggaaagcggatatgtgcaaccgggtgaacagttcgttcagcttcgttgcttatatgggaaagtcaaagcaaagtaagactccgctcctcttccaacaggggacgatttcttccgaccgttcagacttgatgtttcgagccttggaaactccagttccaaggctggaaactgtagtttcatacgctggaaaccggagtttctaaggctggaaactgtaatttcccataagccccagtggataaaaatcccaaactttgcattctcaaaccaggaagggacaggtcttgtatctaaggactcccatgcaggagcataagttttttgccccattaaagaaatagataccaaacaaaaaatagcaatcagatgtgttttcatcgttttaaaattaaacagttattgtactattctttaaagacattggcaaatatattaaaaaatataattaattggatcatttattattatattatttaatatgtagggcagattaagttattatacatggcggaatagaactttattcttcaaagcatatcgctcgtccacgactctatctgtggggaaaaatgtaaagatcaaccgccattctcctttgtgataaacgaacttacgaccgtttgcgcctcgaagaattatttcatatttttcccatagaaaggcttcaatacgtttcggcatttcgcagcccattgccgaaaactccactgtaatgaagaaatgtggaatagatattccggcaacttcctgaaatatacgatcgattattgtcatttcttagcttcttttgatacctccaagagctttccgtatgcatcaaatgaccttcgcgaagctaacgaaatggttatcatcagcgacaacatggatgcagtgaatgtgatcaccataatcatcatctgatatttgatagccacattcggactgcttcctcccaaaatctgtcctatcattgttcccggaagggctactagtcccattacggcaatattggcaatcaacgggctgaaggatttgataatagcttgtttgataaatggtgcctgcgcttcttgtcgcgtagctccatttcccaataaatatcggtatagttgttgctcacgtttcaggccactataatatgtattcaaagcaatcacattgctcgatagcatatttcccattaggattccgaagatcggaataaagtactgggcgctaaaaatattatccagttgaagcacaatacctataaaatataatccgaccaatattacactgcacaagaatcccacagtaatgggaatcagtaagatgcgtcgtttcagtccggtccgtaccaatgctgtttgtcccgcaacgaatatcataacaatgacccaaagaaaattaatccaggggttattccataaaaagagatattttagataaatgccgataaaaaataattgaataatcattcggagtgtgcctatcacagcaggtttcaacaatcccgtcttaaatttccatagatagaaaaagggaatggcaagcagcagcaagccaacaaaaagattataatatgatatatcaatggttcccacaacaagtttcgttttatatcgtcctaacagatttcgtttataattctattaaataatggcatcccgaagcaaagtccttatcatgcgatactgccaaaacagctgcccctttttctgcctgccgtcggaaaaaagccagtactttgtctgtcgatccggtatctaatgccgatgtcggttcatcaattacaatcaacggcttattgagcaatgcggccacagctaacataatgcgctggcgctgtccacccgaaacctcatttactcttttaaagtataattcatgctccaatcccaactcgtcaaaacacataaaaagcctttcttccgaaaaaggaacggaacggtttactttcagctcgaatggcaaagataccatttcttttacccattcgaaaggtaacgccagttcttggggaatccatgcaatctggcggcggacaagatcaatggttgatttatccagtaacgtcccgcctactttaatagtcccctcatataatggcacaaagcccattacggcgtttagtaaggaagtctttccacaaccggattgtcctacgatacaggctgtctcgcccttctccaatttcatttcaaaaccggaaaaaaggacttctgttccaaaagcgatacaggcattattgatatgtaacatggcgtttttaattctttctttccggcaaaggtactattttcttgaaaaacgttatctttgcctcactaattaattcgagaaaagttatgatactaaacgaaagagatgcccgtcacgagcatatattgcaggttgcccgtcagatgatgacagctgcacgtactgctccgaagggaaagggaattgatattattgaagtggccttaatcactgatgaagagattaaacaactatccgatacaatggttgctatggttgaagagcacggaatgaaatttttccttcgtgacgctgacaacatcttaaatgccgaatgtgttatattaataggaacgcgcgagcaagcgcagggcttgaattgtggccattgtggatttacaacctgtgccgggcgtacggaaggagtcccttgcgcaataaatagtattgatgtaggtatcgctattggttccgcttgtgccacagccgccgatatgcgcgtagacacacgtgtcatgttctctgccggactggcagcacaacgcctgaactggctgaaagactgcaaaatggttatggcaattcctgtaagtgcatcctccaagaatccgtttttcgaccggaagcctaaacaggaaaccaaggcttaacaccgtgtatggccgagttaaattaaacaatttatataaacttaaatagattagtctaatgggaattatggttggactccccagccccagtggttcggagaaggatttacaattaaatttcggaaagaatatgaccgtacaggtggaaatgagagctcctcatctgcctgccgaatggcatacgcaaagcggcatacaattaacatggccacacgccggtacggactgggcatatatgctgacagaagtacaggagtgttttataaacatagcccgggaaatagcagaacgtgaattactcctgattgtcactcccgaaccggaagccgtgagagaacagatcgcttcaagcgtaaatatagataacgtccgtttcttggaatgtgaaaccaacgacacatgggcgcgtgaccatggtgctatcaccatgatagacaacggcactccttccctgctcgacttcacattcaatggttgggggttaaagtttgcctccgacttggataatcgaattacccgacacgccgtagaagcggaagtattaaaaggtcattatgtcaatcgtctcggtttcgtctttgaaggaggttctatcgaaagcgacggtatgggtgttctactcaccacttccgaatgcctgctctctcccaaccggaacggacaactcaatcaagtagagatagaagaatacctgaaatcaaccttctatctgcaaaagattctttggctggatcatggttatctggcaggtgatgacactgacagccatatcgacactctagcacgtttttgttctacaaataccattgcttatgtgaaatgtgacgataaagaggatgagcattacgaagcactgcgcgcaatggaagaacaactgaagacattccgtacgctggcaggagaaccttatcgtctgttagctttgccaatggtcgataagatagaagaaaattgcgaacgtctgcctgctacatacgctaattttctgataatgaatgatgccgttctctatcctacatacaaccagccggcaaacgaccggaaagcaggtgaagtactgcaacaagcatttcccaaacatgagatagtaggaattgattgccgtgcgcttatcaagcaacacggttctttacattgtgtcactatgcaatatccacaaggagttattaaataaacagtcattatgagaaagataaaagtaggattgatacagcaatccaataccgcagatatacgaatgaatttaatgaatcttgcgaaaagtattgaggcttgtgctgctcatggcgcacagttgattgtacttcaagaattacataattcgctttatttctgtcagacagagaatactaatttgttcgatcttgccgaaccgattcccggtccttccaccggattttattcggaactggcagcagctaatagagtggttcttgtcacctctctttttgagaaacgtgctcccgggctctatcataatactgccgttgtttttgaccgtgacggaagcattgcaggaaaataccgtaaaatgcacattcctgatgatcctgcctactacgagaagttctatttcactcccggagatatagggtttgaaccgatccagacttctttaggaaaacttggagtattggtatgttgggatcaatggtatccggaagctgcccgtctaatggcgctgaaaggtgcagaacttttaatttatcctactgctatcggctgggaaagtagcgatacggatgatgagaaagctcgtcaactcaatgcatggattatctcccaacgtgcccatgctgttgcaaacggtcttcctgttatttccgtcaaccgtgtaggacatgaacccgatccttcgggacagactaacggtattctattttggggaaatagctttgtggtcggtccgcaaggagaattcttagcgcaagcaggtaatgaccgtccggagaatatggtcgtcgaaatagatatggaacgttcggaaaatgtacgccgttggtggccattcttgcgtgaccgtcggattgacgaatacgaaggactgactaaacgctttctggactagagtttgagatataatcaatagtcgtatattaaaaaacgaagggcacagagtgaaatgtaaaattaaaactctgtgccctttctatatactgtataatggacttcttattggaaagttatctttttattagccaaaaaattggcacctccataaataaacaagcccagaaattgcgcaagatattcattaacgtccaatccttctactaacaggataagaaataagaattgtgcggtgtaagccactccgaaagcagagcaaaagagcagtatctgtttccagagactgttctttttgttttctacgggaaatatccagtacttacaccagataaaattatgaatctgagctatcaggtacgccgttatattagccaccatatagtcaccgtcgaatgatatttctttcatcattaaccatacaaccaacgccataatcaaagcgttcattgtaccgattactataaaacggaatatacgtactgattctttcactctccttccttgatatcaacgatcaaattcaattcgtcaagttgagtctggtcaatagcagacggcgcatccaacattacatcacgtcctgagttgttcttcgggaacgcaatacagtcgcggatagaatcgagcccggcaaacagagatacccaacggtcaagtccgtatgccaaaccaccgtgaggaggtgcaccgtacttaaacgcattcatcaggaagccaaattgtgcctgtgctttttcaggtgtaaagcccagaatctcgaacatcttagcttgcagctgtgcatcgtggatacggatagaaccgccgccaacttccacaccgttaataaccatatcatatgcgtcagcgcgcacagcagcaggatctgtatccagcaaaggaatatcttcttctttcggatgagtgaacggatgatgcatagccattagacggccttcctcttcactccattcgaacatcgggaagtctatcacccaaaggcaagcaaacttgttcttatcacgcaatcctaattgagaacccatttccaaacgaagctcacaaagttgcttacgtgtcttcatcacatcatcaccggacaggatcaagatcaaatcacccggtttcgcaccgaacgcttctttcatctgctgcaatacttcttgggtatagaacttatctacgctcgatttcaccgttccatctgcttcgacgcgggcatataccatacctttcgcaccaatctgcggtttcttcacaaactcagtcaatgcatccagttgcttacgggtataggttgcagcaccttccgcacagataccacccacgtaagcagcattatcaaatacagaaaatccgtggcctttcatgatatccattagttccacaaatttcataccgaaacgtaagtctggcttatcactaccataatatttcatggcatctgcccaagacatacgcaggaacggttcggttagttccacaccacgaagggttttaaacagatgtttagccattccttcgaaagtggcgataatgtcttcctgctcaacgaaactcatttcacagtcaatctgtgtgaattccggctgacggtcggcacgcaggtcctcatcgcggaagcattttgcaatctggaaataacggtcgaaaccggaaaccattagtagttgcttcaaagtctgcggagactgtggaagtgcatagaactgtcccgggttcatacgtgaaggcacaacaaaatcacgtgcaccttccggagtggaaccgatcaatacaggcgtttctacttcgatgaaacctaacttgtcaagataggtacggacttcgattgtcatcttatgacgtaactccaaattagagcggacagcattacgacgcaaatccagataacggtatttcatacggatatcgtcaccgccgtccgtgttatcttcaattgtaaacggaggagtcattgcagtattcagtacgttcagttcggaaacaatgatttcaatgtctccggtaggaatatttgcattcttgctgaaacgttcgtttaccgttcctgtcacctgaataacgaattcacgtcccaatttattggcacgttcacagagttctgcgtttacttcttcattaaaaaccaattgggtaataccgtaacggtcgcgaaggtcaataaaggtcatgccccccattttacggctgcgttgcacccagccggacaacgtaacttgcttatttacgtcagagattctcagttctccacatgtatgcgttctgaacatatattttattatttagataattatcactcgtgtttctaattttggacgagccaaaactttgcaaaagtacgcaataatttgtaattcgtgagtagtaattaataaatttattacccctttttcgtcagtttctttaatatcttcttgtttctatctgttatattatctacaatcgcttcattcattaatttgattccgttcatgtactcctgtgctctttgaagcacatttgccgcatctttttctgctgcttgtggcactaccacacgcaaacctctctgaatcaattcaatattcacatcagcatccgtttccataggatcaccgtcgaaatgtaccacacccggagcggttctacggatacacaatcgtctacaacggaatgttttgatacggctattctgatcaatagtcttattgaataactgaaaagcgagtgaaggaacatctaaaacggtaaacggttcgagaatggtcacatccagcaatccatctgtcagtgtagcttgcggagcgatatatgcattgtttccatactgcgaagcgttaccgcatgcaataagaaaagctttgtatttggttactccattttccgtttccagttcataagtttctggctgatatttaagactttcctgcaatgtcttttccagataagtcaataacccacgtttgccggcatgcgcaaacttcaagctaacaaaagcatcgaagccgactccgcaggtacagaaaaaatctgttccgttaatcttgccataatctattacgtccatgcaaccttcattaagcacttccaatgctttcttcggttccatgggtatatgcaggtgccgtgcaagtccattgcccgagccacaaggaatgattcccaaagcggtatccgtatgcaccaacgaacgagctatctcattgatcgttccgtctcctccgatagctactactatatctgccttttcctcggcagctttcgcggctatttctactgcatgaccggctctctctgtatacactacttcccaagagtatctcgccttgtctattttttcattcagcaagctaagaatcaattccttactttgtgtacccgaaataggattgacgacgaatattattttcttcattctttcgttcatgctattcttgtcgattgtagacgacaaaagtaatacaaatatattaaattttaatctattagaggtttctaatcatacgaaggcaacttttttcccttaaaaagaacagataaaagcaaattttgttatctttgccccctgttttaaacacttgttaagaaaaaaggattattagatcatcagcgagtgatctgagtatgagtataataaattataattcatgggattattacaagagaagttagctaagtacgacctgccacaaaagtttatggcacagggcgtttacccatatttccgtgagattgaagggaaacagggtacagaagtagaaatgggcggacacgaagtgttgatgttcggttccaacgcatacactggccttacgggagatgaaagagttattgaagcaggtatacaagccatgcacaagtatggttccggttgtgccggttcacgttttttgaacggtacgcttgatctgcatgtccaactggagaaagaactggccgcctttgtaggtaaagatgaagcgctttgtttctcaaccggtttcacagttaattccggagttattcctgcattgacagaccgcaatgattatatcatttgtgatgatcgtgaccacgcttcgatcgtagacggtcgtcgtctttccttctcccagcaattaaaatataagcacaatgatatggctgatttggaaaagcaactgcaaaagtgcaatccagattcagtaaaactgattatcgttgacggcgtattctccatggaaggcgatttggcaaacttacctgaaattgtacgtttgaaacataagtacaatgctactatcatggtagatgaagctcatggtttaggtgtattcggaaagcagggacgcggtgtttgtgaccacttcggattaactcatgagattgatctgattatgggtactttcagcaagtctttggcttctatcggtggttttatcgctgctgactcttctatcatcaactggttgcgtcacaatgctcgtacatatatatttagtgcatccaatactccggctgctactgcatctgctttagaagctcttcatatcattcagaatgagccggaaagactcgaagctctgtgggaagctaccaactatgctttgaaacgtttccgtgaggcaggtttcgaaatcggtgctaccgaatcacctatcattcctctttatgtacgtgatacagacaagactttcatggttactaaactggctttcgatgaaggggtattcataaatccggttattccacccgcatgtgctccacaagacacattggtgcgtgtggcattaatggctactcatacaaaagagcagattgaccgtgctgttgagaagttagtaaaagcattcaaggctttggatattttgtaatcagtattagaatcatataaaaaagctactttcctgattccataaaaagggaagtagctttttttatttattggataaaatgtatgttcacatattaaattacatcatttctgtttcgcatagcgaatctccattccccgattatccaaaactaacgagtcagccgttattttttttatcttcattgtatctataaactcaattgtctgcccattgccaatactgtttcctgccagaatcagttgatcaccttcctgcttccaatttttataaactaatgtagccatattaacggaagatgcaataccaccttcttccagtttaataccctgcacttggtcttccattcctgggataggctcaatccatactcctgtgacggaagcagagtttccactacatgcagccaatagccctgtcaacaaagttgttgccaacattttctttttcataattctacgttattgttagattaattatttattgattccggtttttctttcctatcacaatcactttttgagcggtcggtatagtatttaacccgggttcttcctcctcttctatataattcactctcaccgtatctcctaactcaaagcctgctacatcgtttggctcttgatccattgtactaataaagagtgtatctccttgcaaggtaattagcataaagttattcattgaagcgtcctttacaactccggttattatttttatctcttcagttgggttagtcgacaaactgtcaacttctacctcctgctctatgttttgtttacttctcgactggcatgaactaaaaccaatcataactgccaacaataaaaaaactttcattctattcatacacattctcctatttgatataaaattggaatagtgcaaagataatttattcaattgtcttttaaactaaaaacaacaaaaaacattgtatttattcactcttcattatcaatgccggattgatgcggacagccctacgaacctgccataacaatgttcctaaagagattattaatgtaagaataaaacctgttataaatatatcgactccgactggagctttcactgtaaagtccttggtataatcatgaatgatataataggccaaaggaatagcaactgcaaatgccgcccccagtatatatatatacttccgtaccagcaataaggccacttgtttgcctgtagcgccatttaccttgcgcaaggctatctcccgatatctctggcgaatatcatacaacgacagaccgaacaggccgagacaggatatgcagatagccagtccggcaaaagtgacatagatctgagtggctcttttatcttcatcatacaactttttcacttcatcttccacaaacgagtaatcaaattctccctgtcccaacacttcatcatgcaactctttcagaaaatcaaccgcttctttacgctttccttccacaattgtcgctatcaaagggttagtaggattatctcctttatcatataatatagctaaaggagcatctcctttcgccaaatgtcctgtccgaaaatcctctattactcctactatttcgaaaggaggatttttcccttcatctattcccatactccaccacaaacgtgattccggctgtaatgaagcctcctctatattctttatttgaaataacttcttagctgtttcgttgataatcattttatactgggcaaactgatctttgtcgttccactccctcccttctttcagtttcaatccgaacatatccatatactctttatcggcattcataagggctactttatgtttttctccattatccgcttccaagttaatgtaaggttccagatttataggaatttcaccatagctccatgtaacgaacaaaggacacgcattcattttctgcttaatgacttgttctttgtgctgttccaaatcgtgctctttctgccattcttcatcacttgcatacctcctgttttgtgtctcgtgtgacaggaattggcaagatataatatcctttgcccgataacccaaatcagcatgaagcatagtatataactggcgcacaaaatacaaggaaaccacaattaaacagaaagtgatgatatattgaacgaatagaaaaaatgcacgagacacaatggaatgtcccccgacactgactgaacgcaatgaggtgataggtgaagagtaattgtatcttaaaaagggatagatagacgtaattaacggtaacccgaataatataataagagacagtagtaaatcaaactttagatccggtttcacgggtattgaatatacagttgcgaataaccctgctgtaacctctatcagcatccatataatcagcattgaagtagcaaccatacatagattttctgcatatatttgggaaaatacttgaataccactcgcaccatacacctttttaactccaaactcacgcgcccgcttcagtataataaccgtgtagatattgataaaattgaaaattccgaccagcaacagcatacatgctacaacagacaacacaataacatgttctttatttcctcttaagaagaaaccggatgcagagcttaccaccttattaaaatatagctctttcaatggaaaaagcctgaattgtataggtgaatgactaaaacaaatcaatgactgtggtttagagattttttcattaaacttagccaactccgtacccttaaccaaacgtgttatacaaaatcccattcggctccaatccatatattttccctgattcacaggagttatcaaatcaaactgcaaagaggatttggtatccggttcatctacaattccccgtatagtaagtgtatagcctgcggaagaaacaagttgctttccaagcgggttttcatccttaaaaagatgtttagcatattttcgggtaatgatcgcatcatccggacgttgaatagtcttaatgcctgaaatgacaggataatccattagttgtagaaagaaactatcggtcactaaaacattggcctgaaaacggtgatcatcaactatgatataatcatccttaaaagaaatgcaatatgaatacttttctacttccggattcttcatcggatcaataaaattaggatcattattcctgtccgtattgtcaattattgaaatatgaccgttacttctttgagctgtcaatatatataattgatccagatccttgcaaaagtggtctacggtcacttcctgatgaatataacgtacgattattaatgttgccgctacactaatcgcaagccctataatatttattatcgtataaattctaaaacgaaacagggccttgatagctgataactggttcttcatattgcttttattaaataatattcttactcacttttaatcacttctgccggattctgccgggctgctttccatactctccaaataatgctcaggaaaatgataagaagcattacaataaatattcctccatatatccaaagacttatcggagtctgttttacataactttcaagccaatgtttcataatgacgtatcctaatggaaaagcgatacatgatgcaatgataagcaaaagcagatattctttaaagaataaattcagaattgttcctatactggcaccattgactttacgaatagcaatctctttacgacgttgctcgcacgataaagtaactaaagaaaagatgccgaatacggcaattgctatgcatataaaggaaacaatactcaatagcatacttaaagaattttccgatttcatgtactcatcgtatttctcctccatattaatcaaacgtaattctgcattcggattaactttataagcttcttctctcaatttttgagaaacatttttccaggtaccctctttaaacttaaaaatcaaatgacctctattttcacttttttgcttgttgtccggcaagaagaatatagctggagtaaccggatgtatcggggcattataataaatatttttaataaccccttttactatacatttttcgttcaagtgtatcttctttccaataggatgatcccaaccaaaagcctttgccgcagcttcatttataaggaccgcctctttcccgtctttttcatccaacatattaccttccaaaacttcaacttggaaaaaattagcataatcctgattgatggtttccttctctaacttgatacgttgttctttgtccgcctgtccttcccattccctcacttcataactataaaatgacattttaggaataggagtataaaagccatataaacattctataacatcaggcatttgttccagaatttctttaaaaggaacaccttcaaatccataaccggaagctataactcctatattatgtctattcaacccaagttcttttgaattcaatagataatccagctgtttcatcatcaccatagtacaaaacaccaaaccaatactaacaaataattgaaaggaaacacttcctttataaaaccaaccggaaagatgaagatttgatttatgtttaatactatcaagcaaagactgcttgctgacatatcggataagtatggctgccagacttatagttatcaatattaataataatatatacataagcgtttcactataatagaatgaagtatcctcggctatttgtgatagagatctaaagcccggtaaaatgagttctattatcataagtcctaatcccgatgatacaatgagtaacaataccaattcccaaagaagcaatgacagcaaactaccattagaagctccatttactttccgtaatgccaattcacgttttcgcattcgaatacgagtaacaagcattgttaaatagttacataatccacaaataataaccaaagctccaatccaggcaaaaagacgaatgtgattcaatttgacattaacatcttctctcggatgtgtacttcgtaaggtagataataaagcaataggagtagacattaactgtttatatgagtcttgttgcacttcatatttagccaatcttttctccaatgcatttatatcactattagggtaaatacggaaaagtgtatggcttcgttgactcccccaatgtggatcttgatcctcataaggtaataatatatcaaaaggatataaagaatgaccttcccatgattttaccactgcaactattgtcatctttgtattatttgtattaggaaatataaattgcttacctatcggagattcagttccaaatatttgcttagcaattttatcagtaatggcaatctggttattctctaatctcatacggttgcttccttctaatacaataatattaaagattgagacaaagtttgaatcaactcttaattgttgtgtctgatatacatttttctcatattcaatgggtattatgtcttcttgtattatatgacaagccttttctacttccggacagtttttcattatataatcagccaacaaacttgacgaataataagagaatccgtctccttgcaaatcaaatttattacctgccagataaatacggtctgttccttcatgaaaattatcatacgtcatttcataacgaatccataatacggaaagcgcaaagcaagtaaacccaaccgataatccaattatgctgataagtgtctgcgttttgtattttactaagttacgaaaagctacttttaaacaatgtgtaatcataatatcaccattaattattattcattcttaattacttctgccggattctgcaaaacagctttccatactcggcagcctatacatagtaagataaaaaatcctataattccaaatatagctacatatatccatacctcaatcggcgtttgccttacataccgatcaatccattgtttcattaaaacgtatccgacaggaaaagctattataacagctgttgccagcaacaataaatactcacggaaaaatagatgaagaatatgatatacctgtgccccgttgactctacgtatggcaatctccttacgacgttgttcacaagataatgtaaccaataagaatattccgaacaaagagatcagaatacaaactaatgatacgaaagtcaacagcttcattaaagcactctccgaacggagatacttatcatattcttcctcctcattaaacaatcgtaaataggcattcggaaaatcttctttatgcatggcctcaatcgctttccggcattcgtgccaggaaccttcctcaaatttaaacaaaatactggcacgaaacagcagataattttgtgcttgaggttgttgtaaagcgatacatcccggaatacttgtaggcggttgataacagaaattccggacaactcctaccactctatatgaatgaagaattttgccatccttctcatatcccaaagtctttcctactccttggttccaaccaaatatccgaagtgtattttcatcaattacaatatcattgggagcattcttttctgagagcagttcgccttcaattaatttcaaatcataaaaatcaaagaaatccttcattgcaggcattatgccaatagttataggttcttctactgcttcaggcatatcctcccaatggttcatttccgcatacatcattggtccggtaggaataatcggaaaataacggggaggcagaacttcggtcaccataggtaaagctgctatcttaccgccccactgttttatatcacctctccataatgcaacattggcaatattatgacgttccattcctaagtctgtatgcttcaggaaataaatctgtttcattataaccactgtacagaatatgaaaacaagactgactatcaattgtataacaatcccgaacttacggaaagcatacggtctgtttactgaaactttccctttgacagcgtcttgcaaagttcggcgacgaaaatgatatagtggtatctgagccaacaaaagagacaaagctatcacaataaacagatatactaaaatctctccataataagagttgggagctattcgtgtgaactcgaggaaacgggacatacatatttcaataaagaacaatccggctaccaaagctataaactgaacaatcaatagttcaacggtcaactgaacaaacaaatctttattacctgctccattcactttgcgaagtgccatttcacgcctacgcatatataaccgactgatatagagagtcaaataattaaataacgaacagataatgaccaatccaccggctaatgaaaaatataagatatagctaaaagtaatcacggtatcttcccgagatacataaccggaatagcgtaaagccgatagcggggtcaataatagctctcccaattcattttccttctcaatatcattgatacggagagcagcaatttttttctgaaattcttccccatttgtccccttacgaatgcgaacaaataagttttcattcgcactcccccattgtgtataatgtctggcagaagttaatatactatatggaatattggaatgagaagaccagccactcacgattgctccaactttagaagcatgtccactaacctctacctcccgacccaatgcctcttcctctccaaatatccttttagaaaattcttctgttatagcaatttccccattggttcccttcaagaagttcactgttcctcttaatactcgtatattaaaaaagttcatcaaaacagaatctgcagtagccgacacaacatccttctcagtatccttcacacgaaatttaactttctgtacggaagtagaagccattgcctctatttccggattacctttctgtaaataatcagctaaaggataaggagtagaattggatatcttaccaggttcatgtgcataatgtgcacgcaccagataaatacgttccgcaccttcgtgaaaagtatcataagtcatttcataacgaatccacaaagtagacaatgcaaagcatacaaagcctactgccaatcctaaaatactcacaatactttgcaccttatattttgccagattgcggaaagctacttttagataatgttttatcatcatactcttttaatgttacatgctgacttcagttactacttgtccgtcgaacagattgatgacgcgatcagcgtaaccggcgtcatgctgggagtgcgttaccattacaatcgttgttccttccttattcaattcgctcaatagccccattacttctttaccattctttgagtccagattaccggtaggctcatcggcaaggatcaatttagggttggcaactactgcacgggcgatagcgacacgttgctgctgaccacctgacaattgttgggggaaatgtttgctacgatgagtaatagccattcgttccatggcagtctccactctctttttacgttcggaagctgagatacccatatagagcagaggtaattcaatgttttcatatacgttcagttcatctatcagattgaaactctgaaatacaaaaccaatgactcctttacggagatttgtacgctgcgattccgtgtacttcgaaacttccattccattcagataatactctcctcctgtcggattgtccaacagtcccagaatattaagtaacgttgactttccacagccggaaggtcccataatagcaacaaactcaccttgtttcacttcaatactgacattattcaatgcccaagtttccacttcttctgtcttgaaaatcttctgtaaattaattgttttaatcataattgtactatttaaaaattattgaatttattcattcttgataacttccgcaggattgagtcgtacaatccttaggattctaaagataacggttagtgcagtcaataaagttactcctacaaatattcctacccaatataatatcccgtcattaaagaatatctgatatatttctttccacatatggagaatgacgtataccacaggaaaagctaataaagccgatgttgtcaaaagtaacatatacaaccgggaaaacagtaagataatctgttttattcccgctccgtttattttccggattgccacttctttctgccgacgttcggtgtcaagagtaatagctgaatatactcccaataaagttataatcagacttacaatagagaaaaataaagttatattcttgaatttagtttccatggcctgttgttcaatgatatcatccaaaaaagttgttatttcgggctcaacactttccggtaacacttcctgcaaaagttgggtcatccattggcggacctcttcctttttatctgtgtaacacttgatataacaatgacctacatttccattatctttcataggaaagaaaacataaggagtctgctcctctttataagcataaaccgagggagtaaaagaagacaatataccgcgtacagtataagcgtctttataatgataaagagtagtccccagtatattttctttttcattcataaatatttcatcgaccaatatatcattattgccttccatattttgtcctgctgacaaggggatattcataaaagaaataaaatcaggcgttaccctcattatatttatttccagccacctatccgagtctttatctaattgtatgcctgtacgatccggactaccatttaagtaaccgtcttcagaaagtaagacatctttcacgcctgaatactgccggatacgttcaacaagcgcaactttttcttcatttttcataaaagtatagtccaatttaagacttaatatgctatttttctccgctttagtcaacgtattgtacagcgtagatattgtagtatttgtttgtaaataaagagcgacagtcatagaaacgaatagccaacaaatgaaaaactggattcctaacatgctattacgaaagaaatgctttttacttttaagcccattgctcatgcctaattgtatgtttaccctacggatataaaaagcaacagaaaaacagatcacaaatgttgctatgagaagaatgataatatattgtccggcttgtaacatcaaacgctctctatcaatggacaaacttaaatcagacaatgaaatatgcattccggaagacaatatttctatgagtccgaacataaataaagaagcgattacaatgaccaaaaacaattgcacaaaaagcatcattgccagatgaaacatatcatttcctattatcttccgaattgtaaattcccgttggcgattgattatacttccaatctgaaaatggaaaaagtttagtaaagcaactaataagattaaaactgctacaatgctagttattgagctaaagatggttatcatgtcagagttgccattactttttccaataggagaaacaatcaggtcataatcgcaattaaacattcggtgagtgacattactctttctatacacttcatttaaatctttggctgttctgccttcatgaagcaatccgtaagtataaacgcctgtctggtcattattaccggtcattttaaataatccttcactatcgttcagaatgagaacttcaattgtccgcatgaagttcatactgacattggctggaatatctttaatcacagcctgaattgtgtatgagatacctccgctatcaggagttgttttcggagaagaccatattttgcttgtcatcaccatacgtttaccgatagcctcctgattatatggaaataatttgcgtgctgtactttctgttattactaccgcattaggagtataggctgccactctccacgaacctgccacaacagtcggagtgaacaaacgattaaaaaacgagtcgacttctatgcattcaaatgtatagggtagtttcttttcatcatttgtatacacatcaaaaggccgttgccgtgcataagcaactctggaatatgcttctacttcatgtccatattcttttgtcaacttctccgccaatattgcaggagtaccggataacatcctaccttcatcagctaaattgatgtctaccaaacgatgataattattaaaacattggtcaacactctgcatatagcggctacaatagaaacaaatactgaagcatagcagtcccacagccaagcctatggttgatataagattttgggttttatatttcatcaaattgcgcaaagcaacttttgaatagtgctgtatcattttgttttcttttattttctaattcaaatatggttttcctattcatttttgatagactccaccggattaactctggcaatcttcaagatacgaaaccaaatcgttagtgccgttatcatagcaacagatataaaaatccctgtccagaaccagaatccacagttaaagaataccgtatatatttgtttccatagctgtaacactaggtatactaacggaaaggatagagctgcggtaaccatcaacaaagttatatacaaacgggtaaacaaccagataatatgcgacattccggctccatttactttacggatagccacttctttctgtctacgttcagtatcgagggtaatgctggaatatacacccaacaaggtaatgatgatactgacgattgcgaaaaacaggatagtatctttcagcatatattccatagcctgtatttcatacaggtcgtcttgaaatgtacgaacctgatacgatatattctccggaagtacttcacgacggattttctcaatccactttacgacttctttttgttgttcagggtaacattttacatagcaatggccaacatattcagaaggatcatagagcataaaagcatagccgccactatgataatggacatcagtctggaaaggagtacaaactccacatacggtataatcattattttggtcataaaaattcattccaattacattcttcttttgtttgttttgccatactttatccatgacaaggtcattttttgtccggatagttctgccctcctctatcggaatattcataaaagcaaagaaattcagcggaacgcacataatattgatatcagtccaggagttgtcattccctttctcggtcatcaacaggtttccggatactccttgtgtataagcaatatctgccaataagacatcttttacccctgcatgttgctgaaaacgttctaccacacttaacttctcttcatttttcataaacgaatagtctaatggaatgctaagaatcgcttctttttctttttggttaagcgtatgaaacaatgtttgggttgttttctccgactgtaaaaacaatgcgacagtgaatgatacaaatatccagcagataaagaactggattcccagcataaggttacgtccccactgcttacctcgacgtttatttactcctccatgaatgcctgtttgtatcgaaattctgcgaatacggacagatacaaacagacaaattgcagcacagagcaatataagaagaatgatatattgcatagcgtgtatcaaaagaatttcgggcggaaaagtcattgtaatgccctgtagagaaaaatccattcggttgccaatcaattctattccccatattactaaaaaggaagatataaccaccacaatcaatgattgtacaaacagcaggcagaattgttgtttccaattacatcctgccattttcataatactgtattctttagtgcgattaagaaaagaaccgatcagaaagtgaaagaaattgattagtccgaccagtaatatcaatgtaccgactattcctgtcacccatcccaacacaaaagcacctttcttctgtgccctgtcgctaatataattagcaacaaccgcataagactgattatacatagtataactataattacgcttagcaaactgctgctccagttcagctatattcgtattgggagaaagcaagacataggttctggctcctgtcatatcgtgacgtttcgtacttcggaaaagtccttcgctatcgttcagaaccattgcatcagtatgcgtcataaaactaaaaccattgtttagcgggatatctttcattactgcctgtaccgtataaacaatacctcctgttttcggagtactttcaggcgaagtatggagtcgtcgcgccagagtcagatgcttgccgatagcactttctattttaccgaatatctttatggcagtagattcacttaaaataacggcattagatgtccggcttgccgtcttccaatttccggctactatttggggagtgaataccttattgtataaagtatctatttctatcgtttcaagttcgtatggtaatgatttttcctctgaaatttcggcaagataagaacgttcacgcgagtatgtcatacaagaaattgcttccacctctcccattgcccatgtgcggagttcttcggataaagccacttgtgtaccggaaaaatatgtttctgtctgataatcataaaggtttaattccacaatgcgagtgtaattactgaaacaatggttggtggtctcaacaaaacgactacaatacatacatatgcagaaacatagtaatcctaccgcaagaccgatgatagaaattatattttgggtcttgtatttcagtaaattacgaaaagcaactttcaaatagtgtcgtatcatatattattatttttattctattttcattattttggccgggtcaatacgtgatgccttttttatttgccagcacagtgtgcctaaagagatacaacttactacgagcaatgctatcagaaagacattcatgcttaacggagcttttatcacaagagctttagtatactgataaatcaagtagcaggacaatggaatagataccgcaaaagcgcttcccaatacaaccaaatatttacatccaagcagcaagtacaagtctttcaccaatgcaccgtttactttacgaattgcaatctcccgatagcgctgacgaatatcaaataatgaaataccgaataatccgagacagattattataattccaatacatgcaaaaatagcatataccatggctattcgccggtcgtttttatagagtgccgccacatcatcatccaatagtgaatatttaaagtcttccgtaccatatacttttttctgaatatctttcagataattgatgactacctgagttttccccggataacaagcaatctgatagtaatctcccttcaaccgtttatttacgataaataccatagggcgagcacccaatcctacatgtctatcataataatcttctattacggcaccaataggctgtgcctgtaaatcgggttttatctttctcatctgctcattaattatagtagcccccttgcaacttgtgtagcctaaagcggccaatgcggcacggttgacaactataatttcacctccttgttctttatctgcttccgataaatctccttcaataaaaggaatctcaaagagtttaaagaaactgtcggtaacataactctgattcaacgtaaccagttctccttttgcatttcgaaatcctgcagaataatcaaacccaagaatagaataaaaaccggttgtccagctttggatatccggacaattatctatcagttgatctatcgctaaaactctttctttacgttggtttacagtttcagatgtatacgaagaataatcgttcgattcatatatcatatttgcctgaattatatcttttgtacggaatcccggatctgtctgcaacatcaaattgaattgcttattaaaatagatggaaagtaagaccaataaaaaggtaacaacatattgtacaaaaaggaatatcatacgaaaacgaatagaacgtttatcggtacctaatgccttgagagcaacagccggtaaagagcgctggcattttatatgtgaatacaggcttacagtcaaagacaggaatatcaggatagatatcgacaatatccagtcgaatttagtatagactatccggctatccaacaagtgggatacaaaaacagatgttatttcaacaataaaccatgcaaacacaatagaaacggctatcagtagaacgttttctgtgaaaatttgcgtaaacagtgtattgccactggcaccgaatacttttcgaagattgtaagtcctccctcgtttcaccattaatacagaataaagattaataaagttgataatcccggcaaacagtatcaataaacaaattcctccaagaatgaatagatgagaacgattcccactaacaagcatactaggccctgtttggtaaagtaatgcttgctcccaatacatttgactgacaggaataagagagaatgtgtatttacgaacatctccgaaacgagaatcttgatttataaaccggggataactccctatttgattggcttgttccactgccttctcagaagtaaactgaataaactccaaaggcatccgtccccagtctgtcgaaaatgcatgagaaagtactatatcgaaattgaatgtttgtttatttaccggctttttcaatatacctgtcaccttgatatctttaccgttagaaaaacgtaacaccttacctagcggattttctttaccaaaaagttttttggcgaaatcttccattaacaatgctgattccggaacttccaaagaaatctctccctgcaatacttgataaggaaaaagtctgaaataagcattgtcagctattaaggcatgtacagaaaaacgatttgtctgataatctacataatcattctcaagcaatattacacttgaacgtgtcagtataacattgtcatctatataagtactatcacgctttcctatttctgccttactcaacacccggtttccatcaaacgacacttgaactccatatacctgattacggtctatacaatgcatatctactgttgtttcacgataaatataacgggacaagataatacaacaggctagactaagtgtcagtccgagtaaattgatagtcgtatatgatttcgcacgtaataaaaagcgtactgcatatttcagtgttttcatactatctgtttaaagttgtctgtttatcttaatattaattcctcagcatcgccaaaggtatcatatcccgtcgtaataacccaatctcccggccgtaaaccttctgtaatttcgtattgttgcggattttggcgaccgacagacaaaggtacacgaacagcttttgtttttgaagcattcaccttataaatccattgtcctcccgtagcctgatagaaattgccgcgtgggataataagcgtctgctccggttgccctagttctatctgtacacggaaactcttgcccactcttacgttatcaggtatatcatctgtgaaaacaagatcgacatcaaacatacggtcttttacttcagggacaactttcgttattcttaacggatatttcttcccttgataattaatggtagcaggcaatccggtagtaatccggtcaatataatattcactgagcgaagtatggattttatattggtcaagtacctttatctcagcaatactttcgccggaagacacttgctgcccgggagtaaccttcacaaagctaagctgtccttttatcggagccgttaccactaaattattcaaacgttcatgaacgcgttcatattttttccgttctctttctcggtcgttgcggataagttctttacgaatcattgtcacagcagaatcgtgccgcaagctctcctgttgcaaagctgcatttttttgtttataattatactcatcttcagctacttgcaactgggccttactctttactcccatttgatattcctcacggtcaagagcaatgctttttttcagacgctcaagctcataattattcgtcaaggcctgctgtttcaaattcaggctcttttgctccatttcaatctcctgctcctggtaggtaatcatttgtttttcccattcatcacgctgatcttcaatgttacgaagtaggtccggattagaaagaataagaatagtatcaccttgctgaagtaaactgccttcttcacctactatgctttctacacttcctgcttcgcgggtattgactttaattgtcaatataggttgaattagcccttctacatctacatattccataaagtcagcatctttcacttccgctatctgaatattctcggcatcaacacgcagcttcctgggacctaatgaaaggacgattacataaatcagaaaggagataaacaaaagtcctcctgtcagatagtatctataacgaatgtaccacggcttcttttctaattttatatccatgaggttatatagtttttatatttatatcaattataaaaaatcattctatcctattcaatgaggagattataatcctccgtcagtaacttgttactctcaaaatcataaagtgtcatgctacggagtgtgtaatacaaactccaatagttgtataaagccgatacataattacggcgtgcactatctttttctgaaatggaagcgttcaaatcaagaatggtagattttcccaatatataaagtttacgggcaacttcattcctccgttgggcggtttcatctgtacgggcagcgatacggacacgttgcgtttgcagattaaactgcttcaccagtttacggacattcagttcaaaatccgtcctgctttgttccacctgcgtataaaccaggtcacggttagaacgggctacccgtacctgtccctttccccgtccccaatctaaaattggtagggagatacttaaacttacatattgttgatctaaaaggtttcgataagcctctggtaatttatccgctgtctgtgtcagtccgaaacgaagataaatgtctgctttcaaacctgcattggcacgggctctcgcaaccgcactttcactttccagcttgcgccgtttcatcgtttgtatatccgggctattctcatacgccaatgctagcgcctcattcagattaatactgaaattcggtatccgggaactgacacgtacacgaatctccctctcttcctgaatgcccagatatgaacggagttcctgcatacagttatccatttcaatacgggcgttcatacgatttgtttcttctgtaagacggttaagctccagttgcagcatttcattctccgttattgtcccgatattgtaacgtccttgtgcatagcgatataacgtgtcggcattcgcataattaaaggatgctatgtcataattactttgggcagtggctagagcaaaaaatttattaatcgcattggcagatacaagttctaatgtctctacatagtttttctttgcctcctgatagcgtaccggttctattcgtttatcccatttcaaactattgtagccgaaaagcgattgccggtatcctatcatgataggtgaagtctgccacgaatatttatgttcgctgaacaaatccatacgttgtgcggacgtttcaagaaacaaggaacctcctgtccaaggtatgttttgtgaaagattcaaagtcagatcagtattcaacaaattctgctcaacaaacttaacggaaccgtcccccattgttatcttattaatggcacgattcagattaggatcggatgtcaagttcaaagtcggtaaatagttggcacgataatatttataattccaataagccgaacggaagctatgacgtgccgtctgcgcatcgggagactccagacgagcaatcttcacaacttgttccaatgacagttctgttgtctgatcttgagcagccaataattccgtcgccaggattccaatacttatgcagattattttcagattcattcttagttttatttgttatttataattcaaaacctgtgccatttatataaatatttgtatatcaatgaaatatacttgtttttctttttaaaatagcgtgcaaatacgcacgaaaatagtgcgcaatcgcacatacaacacatgattattatccatatctttgccggtgcagtaaaggaaaaagattatattctaattagctaaaagaatggaagaagtaaacaaactgggaaagatacttatagtagatgataacgaagatgtcctcttcgctctaaacctgctgttggaaccttacacagaaaaaataaaggtagccaccactcccgaccgaatcgaacatttcatgaccacttttcaacctgatcttattttattagatatgaattttagccgtgacgctattagtggtcaggaaggattcgaaagcttgaagcaaatattgaaaatcgatccgcaagcgattgtcatctttatgactgcctatgcagatactgataaagcagtacgggctatcaaagccggtgcaacagactttatccccaaaccgtgggaaaaggaaaaactactggccactcttacttccggaatgcgattacgtcactctcaacgggaagtaaacattttgaaggagcaggtagaattacttagcggtcagaattcttcggaaggagatattataggagaatctcctgccatgcaggaagttttcaccacaataaataaattaagcagcacagatgccaatatccttattttaggagaaaatggaacaggaaaagacgtaatcgcccgtcttctctatcgctgctctccccgatacggcaaaccttttgtcactattgacttgggaagtattcccgaacaactttttgaaagcgaactgttcggatttgagaaaggagctttcaccgacgcaaaaaaatcaaaagccggacgaatggaagttgccactaacggaactttgtttctggatgaaatcggtaacctttcacttcctatgcaatcgaagttattgacagctattgaaaagcgacaaatcaaccgtttaggcagtacgcagactgttcctattgacgtccgcctgatttgtgccacaaacgcggacatccgtcaactagtggacgaaggaaacttccgccaggacttgctctatcgtatcaacaccattgaaatacatattcctccactccgtgaacgtggaaatgatattattctactagctgaatattttctacaacggtatgcacgtaaatataaaaaagatatgcgtggcctgactcgggaagccaaaaacaaactgttaaagtatgcctggcccggaaatgtacgcgaattgcagcatacaatagagcgcgctgttatattaggagatggctctttattaaaaccggagaattttcttttccatgccagtcctaaacagaggaaggaagaagaaatgatactgaatctggaacaactggagcgtcaaactattgagaaagcaatgaaactcagcgaagggaatatctcccgtgctgccgagtatctgggcataacccgttttgccctatatcgtaaacttgaaaaactaggcctatgaaacgatttgcaatcagagtgattttacacatcttatttataatgctgctttctatcggaagttgcctgttgtttcaaaaacagttatggttcagtaccgttatctgcatcatactattaataacccttggtatacacctataccgtatgcaattcaagcaaataattttattgagacggctgacagacggacttcgatacaatgacatgatgcaaactttccacccgccttttaaaaataaaataatgaatgagtgggcaaaagaactttcagagagcctgaaagattttcggggaagattattagcagaggaaatcaaacatcaatattacgaaaacttattaaataaggtagatacagccgtacttgttgccgacaaagccggacatatagaatggatgaaccaagctgctgtcacgcatttaggacagatctcacaattaccggaagcactcctgagagcttctgcaattaatgatattattcgtattgaacaaaacagcactgttttggaaatggctatttcttgtacgaaatttgtagcacaaggaaaagagcaacaaataatcagcctgaaaaacatccattccgtactggaacgaaatgaaatggaagcctggcaaaagctgatacgtgtattgacgcatgaaataatgaattctatcacaccgattatctctctttcagaaacactgagcgaaagggggatacccaaactgcttggagaaaaagaatattccattatgttacaagccatgcagactattcatagaagaagcaaaggattattggagttcgttgaaaattatcgtcgcttgacacgaatccctactcctgtctgcaccaaagtttctatcacggaactgtgtatggatttaaagaaattattcccggaagaatatatccattttgaaatcccttcatcagacctaaccttatatatagatcgggctcaaatagagcaagttttcatcaatttattgaaaaatgcccgtgaagcctgtggtaggcaatctgataaggatattcgggtagaagtaataatttcgcctgctggcaataagcttctgacagtatctgacaatggggaaggtattttgcccgatgttcttgataagatatttgtacctttctttactaccaaaacatccggttccggcatcggacttagtttatgtaagcaaattatgactttacatgaagggagtattaatgtaaaatcagaatcaggtaaaggaagtaagtttattctcacttttcctaaataattgcagtctttttgtgtatcttgtggataatatgaaaaactcatgaaagagaggtcttcaccttctatccccgataaataaaagaaagtatctgtttctgattcataacccatagctttagatatcgtaaagctatgctttatctctcctaaagcaccgctttatattatagatgatgaacaaatagaaatatatatctataaacaagttcaaagataattcaaagaattgccttctttatctgtcacaaacaaagtagaatcaacttatcatttgtataaaaccaaaaaagctgaaacatggtatgcatcagctttttatttttaaatttcttgacttaatattttcgtcggggtagcgggattcgaacccacgaccccctgctcccaaagcaggtgcgctaaccggactgcgctacaccccgaaaacttttaaccgaactcccttttcctttgtagtcggggtagcgggattcgaacccacgaccccctgctcccaaagcaggtgcgctaaccggactgcgctacaccccgctactttctgaaggattgttcttttcaaaagcggtgcaaagatagggagtattttttaattgacaatagctaaacggatgttttttacttattatttttcaataccctgaaattcattcgtttgcatttcaatatttctttttggcagaaatcaaaagcatcataggacgtcgaagctcatctttcatttccggaatagtgttcaacatcacttcgttcggttgtggttctattaattcgaatatttcaaatcctgcttgaagaagactatcatacttattttctttcataatttaagtaaagagggatctgttacatggacaaagatatgtattaatgcgtttattgagatgaattaatcgaaaatatattctagtaaaatgaactatcttttgctgttttctgttttcaaagtagaaacttaaaaaataaaagccatatgaaaacaagaaaacaaaaagaaacaaatgaaaaagaaattcatttgttagaacataaaggatatgaaagaatgatgaatgagataatgccggtacaacaggcagaggtttatcgcaagccgaccaagaaagtagtagaagaggctgtaaaagaattaaatcctgatacaaacagcttgggtagcagaggatgaattcatcctctgtcttttatgattgttttagaagtcaatctctttaaaaaacgatttctcttaaaaatcataaaaaacattattgcatcaattctattgaaaagacgagaaaagctatagtacttgcgatatcagattctttctatttatcattttaaatacattaatatcgagagaatacaaatcccctactcacatgttaagataatattcccgagtcaatgctatatattccttactatattgatgccgggcaacttctgtcaatagttcttccacaatgcattcctgattagaaaaagaaaaggtaatcagagtacgtttaggaataccaccgggcttagttatcacatttagttgccggactgcctgcaatttcttttcagaagctatcatctttactctatcagctacatccttcggaatcacaatcgtaaaagttccattttctgtcaataaaccggttactccttccaataattcctcataagtcaaagaatcattatgccgggcagaatttctttgttgatctggacatcctaatgaatcaacaaaatacggaggattagaaacaatcacgtcaaacttctcaggagattgatattttctaaaatcagcctgtactacttctatctgcttcttccaaggagaacgaacaatattttccttagcctgcctggcagcagcttcatcaatttccaatgctacaatatttgtattcggcaaactacgttgagccaacattaaagcgaccaacccggttcctgtcccaacatccagaatactatgcgcaccttgaacagaagtccacgctcccaaaagtaccccgtccgtaccaactttcatagcacacttatcatgccataccgtaaactgcttaaattgaaaataaggatttgacattttatcacttgtttttaaacctgttttattctactattttactggaaatcgccaaaaataaataattattatggaatacttctccgatcgctctatattttggcattgtttttgtgtttttattctaacagtgctttattattagagagaatcaattaactttgcaaacgatttatgcatatttgtatgacataaactaaattaaaacgaaaagatgaaagaaagatacttattggaagatgtaggtgataacaatggcttctcgctgattactgactatgatggcaacgacgagcaagcatttgaagtgaatgtcaaatctggtgaaattcttccggtcctcccccttcgtaatatggtgttgtttcccggagtttttcttcctataacagtaggacgaaaatcctcactcaagcttatacgtgatgccgagaaaaagcataaggacatcgcagtggtatgtcaaagatcagcccatacggaagacccgaagttggaggatttacataatgtgggtactgtaggacggattgtacgtgtgctggaaatgccggatcaaacaacgactgttattcttcagggaatgaaacgtctgattctaaaagacatcacagagactcatccatatttaaaaggtgaaattgaactcttggaagaagatgttccaagtaaagacgacaaggaatttcaagctttggtagaaacctgcaaggacttgacaatgcgttatatcaaatcgtcagatgtaatgcaccaggactcggcatttgctatcaagaacattaataattcaatgttcctggttaatttcatttgttcgaatcttccgttcaagaaagatgagaaaatggatttattaagcattaactcattgcgtgaacgtacttatcacctattggaaatcttaaaccgtgaggtccagttggctgaaatcaaggcatctattcaaatgcgtgcccgtgaagatatcgaccagcaacaacgcgaatatttcctgcaacagcaaatcaaaacgattcaggacgagttgggtggtagcggtcaggaacaggaaattgaagaaatgcgccagaaggcggaacgtatgcgctggaatgcggaggtcagagaaactttcctgaaagaattggccaagttggaacgtactcatccgcaatctccggattacagtgttcagcttaactaccttcaaaccatgctaaaccttccgtggggagtttatacgacagacaatctgaatttaaagaatgcagagaagacattgaataaagaccactatggactggaaaaagtgaaagagcgtattttggaacatttagctgtactaaaattgaaaggtgacatgaaatcacctattatctgtctatacggtcctccgggagttggtaagacatccctcggaaaatccatagcgtctgcattaaaacgaaaatatgtacgtatgtccttaggaggcgtacacgatgaagcagaaattcgcggacaccgtaaaacatatatcggtgctatgccgggacgaatcatcaaaagcttgatcaaagccggtgcttccaaccctgtttttattctggatgaaatagacaaggtgagtgccgaccgccagggcgacccgtcgtctgctttgttggaagtgctcgacccggaacagaatacttctttccacgacaactttctggatgtagattatgacctgtcaaaagtcttgtttattgcaactgccaataacttgaatacaatccccggtccattgctcgaccgtatggaactaattgaagtcagcggctatatcacggaagaaaagattgagattgcccgtaaacacttactccccaaggaactggaagctaacggattaaagaagagtgatattaaacttccgaaagaaacattggaagctatcatagagtcatatacccgcgaaagcggtgtccgtgaactggaaaagaagattggcaagattcttcgtaagtctgcacgtcagtatgcaacggacggatattttgctaaaacggaaattaagccgacagacttgtatgactttttaggtgcaccggaatatacacgtgacaaatatcagggaaatgattacgcaggtgtagtgaccggattggcatggacagctgtaggaggtgaaatactctttgttgaaaccagtttgagcagaggcaagggcggacgtctcacattaaccggtaatctgggagatgtaatgaaggaatctgctatgcttgcacttgaatatatcaagtcgcacgcttcacttttgcagcttaacgaagatatttttgataactggaatattcatatccacgttcctgaaggcgcaattcctaaggatggaccgtcagcaggtatcactatggctacttctttggcttccgcattgacacaaagaaaagtgaaagctaatattgccatgacaggagaaataactctccgtggtaaagtgcttcccgtaggtggtatcaaggaaaagattctagccgccaaacgtgccggcatcaaggagatcatcatgagtatagagaataagaaaaatattgatgaaattcaggatatctatctgaaaggattgactttccactatgtaaatgacataaaggaggtatttgcaatagctctgacaaacgaaaaagtggcggacgccattgatttatctgttaagaaacccagccaggaatgacatttgagttacaatatacagacactaaaagtaatgcccgtgcaggtttgattacaacagaccacgggcaaatacaaacccctatctttatgcctgtgggtacactgggcacagttaaaggagtacacctgacagaactgaaagaggatattcgagcgcagattattctggggaacacctaccatttatatcttcgtccgggactagaggtgattgaaaaggcaggtggcctgcatcgttttaacggattcgaccgtcctatgcttactgatagcggtggttttcaggtattttccctcgccggaatccggaaattacgggaagaaggtgctgaattccgttctcatatcgatggcagcaagcatattttcacgccggaaaaagtcatggatatagaacgtacgatcggagccgatatcatgatggcttttgacgaatgtcctccgggagactcggactatgcgtatgccaaaaagtcactagggttgacacataggtggctcgaccgatgtatacaacgttttaatgaaaccgaacctaaatacggttataatcaatctctttttcctatcgtgcaaggatgtgtttatcccgacttgcgtaagcagtctgcagagtttgtagcttctaaaggtgccgacgggaatgctatcggtggtcttgcggtaggcgaaccggtagacaagatgtatgaaatgattgagatcgttaatgaaattcttcccaaagacaaaccgcgttatttaatgggagtcggcactcctgtcaatattcttgaaggcatagagcggggagtcgatatgttcgactgcgtgatgcctacaagaaacggacgaaatggcatgctgtttacaaaagatggaatcattaatatgcgaaacaaaaaatgggaaatggacttctctcctattgaagtagacggagcttccagcgtagacactctatacagtaaagcatatctgcgtcatcttttccacgcacaagaactgctggcaatgcaaatcgcttccatacacaatctggcattctatctatggttagtgggtgaagcccggaaacatatcattgccggagatttttctacttggaaaccgatgatggttaaaagagtatcaactagattataaggaatgaaaagcaatcgatttataaaacggctggactggtatatcatcaagaagttcttggggacatacgtatttgctattgcattaatcatttctattgcagtagtgttcgacttcaacgagaagatggacaagcttatggagcatgaagctccttggagtaaaatcatctttgaatattacatgaactttatcccctatttctctaatctgttcagtccgctgttcgtattcattgccgttattttctttacttctaaactggcggaaaattctgaaattattgccatgttctctaccggcatgagttttaagagaatgatgcgtccgtacatgatttctgctgccattattgcattaacaacattcatgttaagctcgtatgtgattcctaaaggaagtgtgacgcgcctgaactttgaagataggtacatcaaacctaaaaagcagaatacggcacgtaacgtacagttggaagtggatagtggtgtcattgcatatatagataactataacaacgcaatgaagacaggaaaccgtttctctttggataaatttgtcgataaaaaactggtttcacatttgaccgcacgccgtataacttatgatactgctaccgtccacaaatggactatccatgactatatggtacgcgaattagacggtttaaaggaaaaaatcaccaaaggagacaaaatcgactctataatcaacatggaaccatccgatttcctgattatgaagaaccaacaggaaatgctgaccagtcctcaattgagtgattatatcgagaaacagaaacgaaggggatttgccaatattaaggaatttgagattgaatatcacaaacgaattgccatgtcattcgcctctttcattctgacaattattggtgtttcgctttcgtcacggaaaacaaaaggcggtatgggacttcatctgggtatcggattaggattgagtttctcttatatcttattccagacaattacttcaacttttgctattaatggaaacgtacctcctgttatcgctgtgtggattcccaacatcctttatgcgggtatcgcattcttcctgtaccagaaggcgcctaaatagaaggataaagaatatataaaatagaagttccgcctattcctgcttgaaagcaagtgtaggcggaacttttttgttgtatccatttcctcttttgtctattcttcattattcgccagacagcgaaccgaaaaatacctctttctccttacatttccaaaatcgtcaaccgacttcttttacataagcagaaagatctgcagcagagatgtttttggctataataacaccatttccatccaataaatagttagtgaacccccgattcaaacggtacttcttaaacaatccggagtcctcgccttctgtttccacgaaacaagtgggcgtaactatttggtccttacgaacggtttccttgaaaatcgactgatattcgtcaaacgatacggaaaccatttccacattacgggaagaacgaagcacattgctcaaacttacattttgcatccgggactgcgcatcataacttgcccaaaaacttagcaacacatagcggcctttcatattagccagtttaaatgcaggttgctcttctgatgtagattcgattttaaaatcaggggctacatcaccctcactcaaacctccggtcggtttgtctttctcaacgaaagcggtcaaggaacaaatcagtaatacaacaaaaatccattttacatgtctcatgtaattcggttttagttaatactatccgggactgtccttaaacagtggtttcttcccgaaacgttgtcttttcaggcatcaggcgaagaggaatccgctgattatcagagcctttatttttgaaaccgagtgcaaaggtaagtaattattaaattaacttccaaaaaaacaagcaaaaatcttactttttgagtataactttttatgttatttagcataaaaacgaacttttttctctacttttgcaggattaaagtctatttcttatgcaaccatcaaatactgaattaattctgattcgagttactggcgaagatcgcccgggactgacctcatccgtgactgaaatacttgccaaatatgatgctaccattctcgacatcggtcaggcggatattcataacacattgtcattgggtatccttttcaaaagtgaagaaagacattccgggttcatcatgaaagaactgttgtttaaagcttcttcattgggagtcacgattcggtttgagccaatcacgaccgaacagtatgagaattgggtaggtatgcaaggtaaaaaccgctatatcctgactgtgttggggcgcaagctttctgcgctgcaactatccgcagctaccaagatattggccgagcaaggtatgaacattgatgctatcaagcgtctgacaggtcgtatcccattagatgaagacaagacagacacacgtacccgtgcctgtatcgaattttccgtgagaggcactcccaaagaccgagttgctatgcaggaaggattaatgaaactggcaagcgaactggaaatggacttttctttccaacaagataatatgtaccgccgtatgcgccgcctaatttgtttcgatatggattctacattgattgaaacagaagttattgatgaattggctatccgtgccggtgtaggtgatcaggttaaagctattacagaaagtgccatgcggggagaaatagacttcacggaaagctttacgcgtcgtgtagcactcttaaaaggactggacgagtctgtgatgcaggagattgcagaaagtctgcctattacagaaggtgtggaccgattgatgtatgtactgaagaaatatggctataaaattgctatcctttccggagggtttacttatttcggtcaatacctgcaaaagaaatacggcatcgactatgtatatgcaaatgagttggaaattgttgacgggaaactgaccggacgttatctgggagacgtggtagacgggaagcggaaagctgaactactccgattgatagctcaggtcgagaaagtggatattgcacagacaattgctgtaggagacggtgcaaacgatctgccgatgttaggaattgccggactcggcattgcatttcatgccaaacccaaagttgtggcaaatgccaagcaatccattaacactatcggacttgatggagtactctatttcctagggttcaaagattcttatttgaatatgtaattgagagagaaaaatagtttatctttgctaacaaataaattgaaagaatgaagttttccgaactgcaacttaatgcaaatgtgcttgaggcgctcgatgccatgcgatttgacgaatgtacacctatacaggaacaagcaattccaatcatacttgagggtaaagacttgatagcagtggcacagacaggtacaggtaagacggcagcatttctgcttcccgtactgaataaactatccgaaggtaaacatccggaggatgcgattaattgtgttatcatgtctcctacccgggaattagcgcaacaaatcgaccagcaaatggaaggtttctcctattttatgcctgcatcaagtgtggcggtatatggtggaaacgacggtatcctgttcgaacaacagaaaaaagggcttacattaggagctgacgtagttattgctactcccggacgtttaatcgctcatttaagtcttggatatgtagatctttccaaggtttcttattttatattggacgaagcggaccgtatgctcgatatgggattttatgatgatattatgcagatagtgaaatacttgccgaaagaacggcagactatcatgttctctgcgacaatgcctgccaaaatccagcagttagcaaataccatcctgaataatccatcggaaataaaacttgcagtttcaaggcctgccgataaaattatccaggctgcctatgtttgctacgagaatcaaaagttgggaattatacgtaacctttttatggatgaagttcccgaacgtgttattatcttcgcgtcttctaaaatcaaggttaaggaagtgacaaaagccttgaaatcaatgaagctgaatgtaggagaaatgcactcggatcttgaacaagtccaacgagaagcagttatgcatgatttcaaagccggaagaattaatatattagtagctacggatatcgtggcacgcggcattgacattgacgatatccgcctggttatcaactttgacgttcctcatgatagtgaagattatgtgcaccgtatcggacgtacggcacgggccaacaacgatggggttgcacttacatttgtcagtgaaaaagagcagagtaactttaaaagtatagagaacttccttgaaaaagaaatctataaaattcctattccaacagaattaggtgaagctcccgaatataagccacgttcttttagtaataagggcggcaactattcaaagagaagaaacttcaaaggaaaaagaaacaatggaggaggaaaagggaacaaccgtccctctcccaggcagaactaaatctttatttggttgaagcaatagtcagagtaccgtcaaaactgatttccaactctgctatactatatacagaactctccggaatggctaaaatggcttgataatgaaaaccattccggtctacttttaaaaacttggtatcagataaaatagcctgtaccaagaaatcctcgggcacaaccttatcaaacatttgcttcgttatatcactggcaaataaacttttcttgccttcgtagacacaaatgtgcatcacattgtcgtaatacacattgtccatgctaatcccgtcttcagaataagttgttttgataactttcatcttggaaggattaatatatacataagcacgataacgagcgccattataaatcactacactatcgcgtttggttacttcagtataggtgggaataaccacttcctcacggacaaaagacaatgaatcattaaagtcctccgacttatgcagcttaatgatattatccgttatggaatgaaaccagaatatatgttctgcctgcttatcaatcttataataagtcgtatcattcccataagtataaagagtgtcccgtataattttaaaagcaattggagcactttgcgagtctgcatagaaaattgtgtctccttctacgcgcatcaacgggctctccgtttcatcgtccagccaaatcccctgcaacatttccttggcattcgaatcttccttctcctcctcggaaaaatacgaattcttattgccggtacatgccataagaaagatagctattaacgatattgccacatactttatcatttgtctcaattttgtagtaaagatactcttattatcttatttaccaatacatgagtaaacgaatccaagttcttccatttcttttttatcatatatattacgaccgtccaacacaatctgttgtgccattgtttttctgataaccgcccatgaaggcaaacggaactctttccattcagtcaccaacatcaaagcatcagcgtcaagtactgcatcatacatatcgcaagcataataaactgaatctccaatccgacgtttacattcttgcatggcagcagggtcgtatgcacgtatctgacaaccggctttcagcagcttatcaatcaataccaatgccggggcttcgcgcatatcatccgtttccggtttaaaagccaatccccataaagcaatggtcttatcctttaagttgtcattaaattgttttactaatttatcaaacagcacacttttctgaagttcatttacttcttccacggcacgaagtacctgcatcggatatccgtttagttccgccgttttaatcaaagcttttacatctttaggaaaacatgaaccaccatatccgatgcccggatataagaacttacgcccaatacgagtatcggaaccaattccgctacgtaccatatttacgtctgcgccaaccagctcacacaggtttgcgatgtcattcataaaactgatacgggttgcaagcattgaattcgccgcatatttagtcatttccgcagaaggaatatccatgaaaatcacacggaaattatttaataaaaatggcttatacaatttagacatcaacttctctgcacgggctgactccactccgaccactacacggtccggactcatgaagtcactgattgcatttccttcttttaggaactccggattagaagcaacatcgaaatctattttaactcctctcttatccaattcttcctggataacagcgcggacttttggggcagttcctactggaacagtactctttgttactaccaatttatattgtttcatattgcggccaatggtacgggcaacttccagtacgtatttcaggtcagcacttccgtcctcgtccggaggtgtaccaacagcactgaatataacttccacatcatccagacaactttcgagtgatgtagtaaacttcaacctttttgctttcatgttacgaagtaccatttcttccaatccgttttcataaattggaataatccccttctgcaaagattctattttctcactatttgtatcaacgcatgttacgtctacaccgatttcagcgaaacatgtacccgacactaagccgacatatcctgttcccacaattgcaattttcatacttatctattgtttgttagtcgtttattcaaaatatacggcgtccttaaaggcagtcccttctctgtctttagaggataataacatttgtgtttccgacagtggccaatctattcccaatgttttgtcattgaatagaatagaagcttctgcttgaggagcatatttattatctactttatatgtgaaaatagcttcctcgctcaatacggcaaaaccatgggcaaaaccacggggaataaaaaactgtctcttgttttcttcactaagcagtacacttacatactttccgaatgtaggtgacgatttacgtaaatcgactgcaacatctaaaacttcccctttgatgacacggaccaatttagcctggctatattcacccttttgataatgcaatccacgtaaaaccccaaaagatgatttcgattcattatcctgcacaaagtttacaggaccaatatgagattcaaactcttctttcttaaaggcttccataaaatatcccctttcgtcgaagaatactttaggctctatcagccatactccgtctatttccgtctgtatatagttcattgttaatagtgctaaataaaacgatgcaaaagtagtgaatttttcgtagttttctgggatatattcaatttatctcttaattttgcacacatgattgaattggcacaacatatagaggctttactattggagaacgactgcgtcatcgttccgggatttggtggatttgttgcacactatgctcccgcaactcatgtaaaagaagaaaatctttttttaccccctacccgtacgattggttttaatcctcaattaaaattgaatgatggagtattggtacaatcttatatgtcagcatacgataccagctttgctgatgcaactcgcatcgtagaaaaagaagtaagtgcatttatcgagattctccacgaagaagggaaagcccatttggaaaatgttggtgagattcattataatatttatggaaattatgagtttataccttatgattgtaagataacgactccttcattatatggtttggattcttttgagatacacgaacttgctactttgcaacaaaaagagaaggtcttgataccagccaatctgactagagagaagaaaacttatgagataaggatcaatcgtgtatatctccgtaatgcagtagctatgattgctgctgtcatactgttttttgctttctcaaaccgggtagaaaatacagatattcagaaaaacaactatgcgcaattattgcctggtgaactttttgagcaaatagagaaacaatcggttgtagtaactcctgtttctgtaaagagtaggggtacacaacaacaggtgcaaaagacatctgttcccaaaattacagtagataaagctaaaacctcaaggcctattgcggttaaagaagtaaaagtcaacaagcaagaaacagtttctgctcctgtcgctgctaaatcacaagcaaatttcaatcatcctttccatattattgtagcaggcggaatcagcatgaaagatgcagaagctatggcaaatcaattaaaggaaaaaggatttgcagaagccaaagccctcaatacggcaggcaaggtacgtgtcagcatacgctcatttgataatcgcgaagaagcaaccaagcaattgctagagttgagaaaaaacgaaacttataagaatgcctggttactggcaaaataaaatcccccttttaaaaacatgaaacgagttctttgtcctaaatgtgagaattacctttattttgatgaaactaagtatagcgaaggccaatcgctcgtatttgagtgtgagcattgcggcaagcaatttagtatccggttggggaaaagtaaggtaaaagctcttagaaaagaagaaaatctggaagaagaagccgaagtacacaaagaagaattcggatatatcacagtgatcgaaaatatattcggctttaagcaaatattaccattgcaggaaggtgataatgtgatagggcgtcgttgtgtaggaactgtcattaatacccctatcgaaagcggagatatgagtatggatcgccgtcactgtattatcaacataaagcgtaacaagcaaggaaagcttatttatacactgcgggacgctccgagccttactggaacatttctcatgaatgaaattttgggagacaaagaccggatacggattgaagatggtgctattgtgacaattggtgctactacattcattctccacacagccgaagaataaggaattgcatttcaagacgacagtataaagttagccccaccattcttttagaatagtggggctgactttatataatccttttataaaagaatatccttcacagtttcaagcatacctttttctaggattgaatctaaattcgctttcacggcttctgccaaccccggaattttattcaggtcttctccccaaataaattcggcacctaatacaccttctgttaccttctttgtacagcctgttgcccaaagttctttcagtagattcataatttcgggagcatcattcggaacaatttcagcgccatctgtacgtacaccacctttatagtaagtaatgatagcggctaaaccaagtaccaatccttttggaagcttacctttacgtcccagatatgttttcagacctggcaggtcacgagtctcatatttcgggaatgagttcagcataatgcttgttactgcatgatctacaaatgggttattgaaacgctccaatacatcagtagcaaatttttctaattcatccttcggcagattcaatgtttccatcaactcgtcaaacatcaccttatggatatatttaccaattacttcatgttggcaagcatcgcgaacgatgtttacgccggataaataagcaactggagaaagaactgtatgagggccgtttaacaaagtaaccttgcgttcgtgataaggagcttctgacggaacgaataatacattcaaacctgccttatccgccgggaattcttttgcaactttctgtggagcttcgattacccacaaatggaaaatttcagcctgtacaacgaggttgtcatcatactgtattttttctttaatagtatcgatatccttacgcgggaatccgggaacgatacggtctaccaatgtagcatatacgccacaggcttcttcaaaccatgttttaaattcaccacccaagttccataattcaatatactgataaatagtctctttcagtttatgtccattcagaaaaataagttcgcaggggaagataatcaatccttttgacttgtcaccattaaatgttttaaaacggtgatacagtaactgggtcagtttgcccggataagaagcagcaggtgcatcttcaagtttgcaagttggatcaaaagctattccagcttccgtagtattcgaaataacgaaacgcatttccggttgctctgccaacttcatgaattcgtcattttgagtatatgggtttaatgcacggctgattacgtcaatcattgtcaggctattaacagtttctcctttatctaatccttgaagattgacatggtaaagatcatcctgtgcgtttaacatatcgaccatacctttatcaatcggttgaaccactactacactactattaaaatctgttttctggttcatgttataaataatccaatctacaaatgcgcgtaaaaagttaccttctccaaactggataatacgctccggacgttgtgtcttaggagcagttcctttgtttaatgctttcatgttagttgtaatttataaagttgatattatacaaattcaaaataaaaatcaatattttccttaatcaatatatcaataggcatatactttacggaatcgacactcttcttaaatactacatggtcacacaaggctttcaccccgcaatatccttgtaatccgggacgttgccctatcaaataatgtacatcacctgatttcaaaaggtctacatttgctttcagaaggtcatatcctatcaatcccttcatgctatgttctgcatggcgaaggtattcccccagttgatagactctggaattaaagacgattccgagcacagctttcgggtgtgcttgaaagaactcgtccaacgtctgctggttattttcctgattggacttattgagcactacttcatgaattgtcaagttatcatattcttccgttatataactcataaaacctttcaaacggcgttgcatctgtatttcggcagggttatttttattattgcttaaaaatagcactaactcctgcccttctcccaatgaataattacgcatcaatatcttagcagcaatgtatccgcttttatatgagtcctgcccaatatatgttaatgcattcgcttcttccatattgaaatcgacaaatgcgtaggctatcttattttcctgtaaataagatgttaattctattgtttcttcccggaaattcggagcgatcaacacagcatctacgctgctgtctctaatagtgtgacaagcctcctgatagctcttcttgtctccatgatgataacaaaggtagttcacactcacgttaaaagggcgtaactcttgccgtgcacgttctataccgcccactaccgaatgccagtagtcatgttctatataatatgggatcagacaaataaaagtatatttctttttagccgccagtccgatagcaaacacattgggctgataatgaatctcatccaataccttttgtactttagctttactttttgaagacacgtcacctcgattatgcaatacccgatcaactgttccggcagaaacaccggccatacgggctatgtcttttatagtatagttctggtcctccatagtgctaaaacttaaatattataaataatcgctgcaaatatacgaattattttgttactccaagtaaattttctatttttgtgttcgataacggttaataaaactaaaacgatatttacgcctattagctttaaaatcaatactatataggtataaatgtagaaagtaataattttatatacttaaaacacagtaataatgaagaacttcatggatgaaaacttcttgctgcagacagaaactgcacaaaagttgtatcacgagcatgcggctaaaatgccgattatcgactatcactgtcacttaatcccccgaatggtagccgacgactacaagtttaaatcactgactgaaatatggttgggcggtgaccattacaaatggcgtgcaatgcgtactaatggtgtagacgaacgcttctgtacgggaaaagccacagattgggaaaagttcgaaaaatgggcggaaacagtgccttatacgttccgtaatccactataccactggactcatttggagttgaaaacagctttcggcattaataagatattgaatccaaaaactgcacgtgaaatttatgatgaatgtaacgagaaacttgcccaacctgagtattcagctcgtggaatgatgcgtcgttaccatgtagaaaccgtatgtactactgatgatccgattgattcgctggaatatcatatcaaaacgcgtgaaagcggatttgaaatcaaaatgttaccaacttggcgtccggacaaagcaatggcagtagaagttcctgccgacttccgtgcctatgtagaaaaattatcagaggttagcggtgttactatctccagctttgacgacatggttgttgctttacgaaaacgtcacgatttctttgcagaacaaggatgtcgcttgtccgaccatggtatcgaagaattttatgcagaagattatactgatgtagaaattaaaactatatttaataaggtatatggtggcattgagttgactaaagaagagattttgaaattcaagtcagcaatgcttgtgattttcggtgaaatggattgggaaaaaggttggacccaacagttccactatggtgctatccgcaacaacaataccaaaatgttcaagctgttaggtcctgacactggttttgattcaattggcgaatttacaacggcaaaagctatggctaaattcctcgaccgtttgaatagcaatggtaaactaacaaaaacaatcctttacaacttgaatccatgtgctaacgaagtaattgctactatgttgggtaacttccaggatggttccattcccggcaaaatccaattcggttccggctggtggttcttggatcaaaaagacggtatggaaaaacaaatgaatgcattgtctgtacttggtcttttgagccgcttcgtaggtatgctgactgattctcgttcattcctttcctatccgcgtcatgaatatttccgccgcacattatgtaacttggtgggacgtgatgtggaaaatggtgaaatcccggcttctgaaatagagcgtgtaaatcaaatgattgaagatatcagctataataatgcaaagaatttctttaagttctaacagatagtaactcaataaaaaatccctctgtttgaatcaaaatccaaacagagggattttttattgagttacgtacaatttcttcaccgattaaaaagaaaaccatcttttctttttcttcagtggtgctgtatcttcttcgttttggctatatatatcggcaaatgtttttttttccttaaccatttcgtagataactccccaatccggtaagccgccaagattccggtcatcgataaacaaatcagctttcaatttccgggaaaaaccctgatgatctttttgttcttcaggataatccttattaattgcgtaaaattccaaccctctggctttacaccattcaactgcttcgtccaaaagcgctccttcccgtacactccacaatatcaaacggtgcttttcttgttgtaacaactttagtgtatcaatagcgaatggaatctcctcgccaatacgtggataacgatgttctacaatcgtcccgtcaaaatcaacagctataaccataattgtttaaatacctaattttacacaaagatacggacagtctgccaaaaaaacgtatctttgcgctgaattaacattttaactaaaaacataactacatgaacaattcccctcagcgtgctgccaaaggctttaccagagcattttgggtcagcaacacagtcgaactgtttgaacggatggcatattatgccgttttcatcgttctcactatttatctatccacaattttaggttttaatgattttgaagcaagtatgatctctggacttttttccggaggattgtatttgcttcctattttttccggtgcttatgctgataagatcggtttccggaaatcaatgattatagcattctccttattgtctatcggatatttaggattgggcgtcttgcctacgttactggaaacggcaggattagtcaactatggtgctactacgcagtttaacggtttgccagatagctatacccggtggattattgttcctgtcttatttatacttatggtcggaggttcttttataaagtctattatttccgcttccgtagctaaagaaacgacagaggcaacacgcgctcgcggttattcaattttttatatgatggttaatataggtgccttcactggtaaaacaattattgatcctttacgcaatgtgatcggtgagcaggcttatatctatatcaattatttctccggtgctatgacgattattgctttgcttgccgttatacttctttataaatctacacatacagcaggtgaaggaaaaagtctccgtgaaatcagccggggatttatgaaaattatcaccaactggcgtttattgattctcatactgattgtcaccggattttggatggtacagcaacaactttatgccactatgcctaaatacgtaatccgtatggctggtgagacggcgaaaccagggtggattgctaatgtgaacccttttgtggtagtgtgttttgttagtttcataacacgtctaatggcgaaacggagtgcaattacttcaatgaatgtaggaatgttcttaattcctttttctgctttattgatggcttgcggtaatttattaggtaacgatataatctctggcatgagcaatattactttgatgatggttgctggaattattgtacaggcacttgccgaatgttttatttcacctcgttatcttgaatatttttccttgcaggcacccaaaggagaagaagggatgtatttaggctttagccatttgcattcttttctttcctcaatcttcggctttggtctggcaggtattctattgactaaatattgtccggaccctaccttatttgagacgcatgctgcatgggaagcagccagtgtaaatgcgcactatatatggtattactttgccgctatcggattgattgccgccatagcattgctattatttgcaaaaatcaccgaatccatcgacaaaaagaagaaatcttctcgataaatatcttcttttttgcgtatatttgccgtcactttgctgtaaaagttgacggcattttgcatttttaataaagaggataaaacatgaaagtaaaatttataagcctggcaagtggcagtagtgggaactgttattatctgggtactgaaacctatggaatactaatagatgctggtattggtatccgtactataaaaaagacactgaaagactttaatatcctgatggatagtattcgtgctgtatttataacacatgatcatgctgaccacatcaaggctgtaggtcatttaggagaaaaactgaatatccctgtttatacaacggcgcgtattcatgccggaatcaaccgtagttattgtatgacggaaaaacttagttcatcagttcgttatttggagaaaaaagagcctataactttagaagatttccatatagaatcttttgaagttcctcatgacggaacggataatgtaggttactgtattgaaattgacggcaaggtattctcttttctaaccgaccttggagagattactcctacagctgctcattatataagtaaagccaattatctgattctcgaagcaaattatgatgaggaaatgcttaaaatgggaccgtaccctcaatatctgaaagaacgaattacaagtaagacagggcacatgagcaactctgatactgccgaatttttggcagaaaatatcaccgaacatctacgatatatatggttatgccatttaagcaaagataataatcatccggagttagcctataaaacggtagaatggaaattaaagaacaaaggagtcattgtaggtaaagatgtgcaactgcttgctttaaagcgaaatacgccttccgagctttatgtattcgaataaagacgaaaaaaagatagtaaaaaagctgcattattgtttggtcaaataaaataaaagacctacttttgcaaccgcaaacgaggaaataagcactcttagctcagttggtagagcaactgactcttaatcagtgggtccagggttcgaatccctgagggtgtacaagttccgaagttgcaataaaaatttaatgttgcactcttagctcagttggtagagcaactgactcttaatcagtgggtccagggttcgaatccctgagggtgtacaaaacagaaaaaggagaacttgtaaaagttctcctttttttataaatcaccgtagctatgatgctacggttttttattctcttcttttccttcccacttttctctaaattcccataattggtcgatagtaggatgaaaagtaggattctcccaatttctgccgatcattgcaactaaggattccaaataagtcttaccattgattatagtagtacacttatttaattcatatttctcggtcggataatttttagtttcaagcattttctttgcccagttcagcaattcctgaacagattcattgtcataagtatgttgtgtcatatctttatattttttcgcaaagatacaaagtttattaattcataaataaagttgtccatttcttttcattgccaatattcgaattattattcatacctttacaatattaaactaaattagattaatcattaaaaaaaataatcatgaagaaaatttttattctggtatgttcgtgtaccctattggcggcgtgcggaaatagttcaaaaacaaacaaaggtacagatacagacagtaccacaatcgaagttgttgatatgcataatgcggaaacttcgcttgattacgaaggaacatacaaaggtgttttccctgcggccgactgtccgggcattgaaacaaccttaatattaaatccagataagacatatacgcttcactccgtatatattgatagagatagttcgttcgacgataaaggtacatatactttaaaaggtaacttgttaactctaaaagaagaaaacggagaaatatcttattataaagtagaagaaaacagggtgcgtttattaactgatgacaaacaggaaataacaggagcacttgccgatcactatatattgaataaagaataaataaaaactttctattatattaaattcggtaaatcggtaataagagcgatagacatatccttttattaccgatttgtctttttctgattctaattggagcaaagaacaaaatcaagatattttatgtttatataaatagagatgaacttaaaaaaagaacaacttatgatttataattttttattccctacaaagccaaatacagcaaaagtttctttgttcctattggcggtccggataatcttcggaatattattaatgaaccatggtatacaaaaatggagtaactttcaggaactgtcaactgcatttcctgatccgttaggtataggtagtcccctatccctcggattagctatttttggcgaacttgtctgttcaatggcttttatcattggcttcttatatcggctggcaatgattccgatgattttcacaatggcgatagctttctttgtgattcatgcgaatgatatatttacagtcaaggagctagctttcatttatttagttgtattcattcttatgtatattgccggtcctggtaaatattcaatagaccacataataggaaacgaactgcaacggcgaaaatcgaagtaacacaaatattgaaaataataaccttgattaattaaaaaatattatatttgcatacatataacagaggcattataaacattttttattaattaaaaaacatttcgacatgaaaagagagaaacttactttagttgcagtgctacttagtggcagcctattgttcagttcttgtgtaggttcatttggtttattcaaccgtttatcttcttggaaccaatctattggaagcaaatttgtaaatgaacttgtatttctagctttcaacattgttccggtttacggagtgtcctacctggctgatgctttagttattaattctatcgagttctggagtggttccaatccgatggctaacgtaggtgacgtaaagaaagtaaaaggagagaacggcaattacatggtaaagacacttgaaaatggatattccattactaaagaaggtgaaactgcttctatggatttgatttataacaaagaagctaatacatggaatgtagttgcaaacggtgaaagtgctgaactcataaagatgaacaacgacggtactgccgatttgttcttaccgaacggcgaaaaaatgaatgtaactttggatgctcaaggcatgatggcagctcgccaagctacaatgagcaaccttatgtttgcagctcgctaataattaaagaataaatatgtaagagatgaaactttctcaaacgagtttcatctcttttttattatccactatattactattctatgctatgaagaagatacatatattaatcctttcagtaataacattcacctgtttttcatgccaaaaacagaaccccaagactcaattggaggagatagctatcaatttctgtgaatctttttataatttcaattatccggttgccgaagaatggagtactccgtcttcactatcctatcttagttttttagcatctaatattcagcaaaatcatttggatcagctcaaaacacaaggagcggcaaaagcttctatcattacttcgagtgagataactcctgactctgaaatggcaacagtaatctgccaaataaaaaatgcatttattatcaatcctatcaatggaaaagcggaacggttttcttctctgcaagatacactccaactaataaaagaaggcaataaatggttggttagaaaggatatcccactgcaaaatggaaagcaaaatcacgactaaatttaggatgaataataggaaaatgctcttttttagtctcaaaagccggattgacagccttcatacctccatcaaaacgaagaataaagaagtctaagtcaagacgaagccctaacccgtaagctactgctatctgcttataaaacttattaaacttgaaaactccacccggttgattggcatattcacgaacagtccagatattaccagcatcaataaagacagctccctgaaatttccagaacaacttacttcgatattcgatactggcatccaatttaatatctccggattgatcgagcaaatttcccttaccggcaaaagaccccggacctagatctcgtacactccatccgcgaacactgttagctccacccgaaaaatattgtttctcaaacggaatagtttttgcgttcccgtatggaacagctatacctataccggcatgaaatgcaaatgaattacgatagtcaatcctgatatttttagagaagtcaaactctcccttgatatattgtgcataaggtattccaagaatagcatactcattattagcgtttttcctaattccagtcatcttcgacaaagcatacattatatttcccgcagactcgaaattaaaacgaatggaatacgagttggaagcgattgtattattaacaatagcccctcctacactattatagttatagctatatcccatatttattatcaggcggtcttgataattatattgaaaaatatcattttgacctttatttatatagtcctctttaaatctttctgaaattcgcggcaaataaaggaaagcaatattaatcaaatcaatacgatgttgtattttttgacgttgcgtccacttataactccatgaagcagaagccattgtacgcagaaattcaggacgcatctgatagttatattgcaagccgaattcagtagttgccctaatttttcgtttaaaatcagaagacacaaaagggaataaaaaattagggaaattaatacttgactctactccgaattctgtatagttattatttgcataccctgcttgaagtccggagatcacttcataagcgccacgaaactttatcataaaggtttctgatccgcgaaaaagattccgattttggaaagaaacagaagctgctgctcccaagtcaccggcagagttggtcccttctacctcaaaagctatagatttatgcttacttttagtcagcatcacatagcagtcaagctttgtcgaatctccaatctgcgtttctacaaaacggatattggtatatttcaatgccggcaagcgtccaaaactggaatatgtctgctgtacatcgcgctcattatacaaatctccgggagcaaaacgaagattatccgtaagcaccttaggacgcaaatacagtttatctttataataaatcggataccctttataattaatagagtcattaatctccacactgctcaatgccgacgactgcaatacatcataatccgtaataaagttaatcttgttaatccaatattgttgatgtgcctttgccgaatcactgacatgagttttaaatgggtgcaagtgttgtgtcaaatctacattataagtatttcgtaccgtatctgcggtatagcctatataatccttattgaatttatagtaaccattccggagtaatttatccgtgattcgttgcctatccgcatccaacacgtttacatcaaaatacatcttctccttcaataaactttttgctgaatcttgtttcaaaagagcagctatttgaggatcgttgatatcatattttatagattgaacgacgtatggttttccggctgttacatcgtaatagagttttattttcttcttctttattttagtggaacgctttaccgttgctgccatatatcccatattatgaacagcctttgtgatttcttcttcagaacgctgcgcttcttcttcattatatatcacaggagcatcacctatccttcgtagaaatttattcccccatttggtagaatcacgtcccgaaagattataaacatataactgtgttttaatcaggctgaaccatttggcattaggattctgacgaacatacattcgtaaagatgaaggccgtatattcttctggtccgtacgaatcttgacttcatccaacaggtaagaaccctccggcacaaactttgtggatgtgcacgaagcaagtgacaaaatagcggcagaagcaagcaaataaagaaattttttcctcatacggttttacatcgatagcataaaaaatgcgctcacaaagataaattatattttccgatgaggaaaataaattaagaaaaagagaggaaagtaaggatagattggaaatatctttatagctttgtcacaaaataaagtttatggtattgttaagtaaaaacaaaataaagtatattcattcgcttgagctaaagaaaatacgtaaagaagaacgagtttttctagccgaaggtcctaaactagtaggcgatttactcggacattttccctgttgtttcctggcagctaccgcatcctggattcaggaacatcctgatcttcgtgtaaatgaaatagcagaagtttctcaagaagatctttcacgagccagtttactgaaaactccgcagcaggtgcttgctgtctttgaacagccccaatatactctgaccccgggggttgcccgccattccctttgcctggcattggacgacgttcaggaccccggaaatttggggactattgttcgtttagctgattggttcggcattgaacatattatttgttcgcaaaacacagtggatgtttataatcccaagaccatacaagccactatgggggggattgcgcgggtaaaagtacattatacctctctccctgattttattcgttcactcggtgaagatatacctgtattcggaactttccttaatgggaaaaatatgtatgaacagccattaaccgccaatggtttgatcgtaatgggaaatgaaggaaatggaataggaaaagaagtagaaactttaataaatagaaaactttatattcccaattatccacaaggaaaagaaacctccgagtcactcaatgtagccatagctaccgcagtaatctgtgccgagttccgtcgacaggctgcatggaaataaaatcaaacggataaaataaaacagggaataatacttcccccttctcttttaattcttttaatgactcttcaaaacaccgggaagattgatttagaatattggaaggattaatttgaaacactgggatattttttaaaatcatcccagtgttttttatttcttcaagctggtcagcaggaagtaaaacaattactcccggcatccattcaaccgactctatttcttccgttagtggaaatgtatctcgaacaactccttcatcggttatttccactacctgctgttttataaaaccaacatcaggcatgaataaataatgagatgcaaatcgtttcatatcactaacgagtttgacgtctttgctgttgctgcctgcgctgattcatttgccgttcctttctttgttctattctctcttgctggatatgttgctctacctcgatctgttccggtttcttttcacgttgagttcctgtacgacgacggttcatttcttccggcgtcaaacgttggacatcctctttatgttcttcggcaactttatgcaaggaatccaccacttcttcctccgaaatctttttcagagaatccgctttcagagcttctatcttattcagggagtcacgaacagcaaaagcgagagtatctttgcaatgataacgagtcatagtgaaatggtctgctaatagcgttccccctttctgctcgcctaacatcggatagtaaatgaaacctctaatttccttcatagctcccagcgtatcagcatataaacgtatttgctgaactcccgggcgggttatagtcttcagatgatttatcgtatctttttcgtagataacctgcatacccatagctaccgctctcaaagaatcagcaagcattggctccagaaaacgataattcacttcccaaaccaaggtatcacggtctttatagttagtatcggtaggcaatacgaacgaataacggttattcatcatctcgccggtcaaacgtatcatacgcaaccaaggccatacatcaagactatcacctggttctgtcattttcggtttcttatctcgcaaagctattaaatgattaacttcgtcctgttggtctttcaagcgtttctttactttctcatagattttcgataaaacttctgtgttgcgtgtataccaaaccatagatgagtcgaatacagcctgcgtagttccatacttcttaaaaacagcatcaatatacaacgcttttttatagttctcactgtaaggcaggttatctcccatggactttgccaaatgataatcatatagcaaactctccattttcgattccgggattacgtcattaggtcttttcactttacatcccgctaccgcaagcgcaaacatgcagatgaaacacagatgaaaccgaagcttacttttcatgattctcaacttcctttttatcgcctttatccaatgaatgatatgactcattcagatatttactataaaagagtaataaagcaatgataccacaactaatggcagcatctgcaaaattaaagatcgggctgaaaaatataaaatgctctccacctacgaatggcagccatgcaggccagtttgtatctataatcgggaaataaaacatatccactactttaccatagaaccaggtggaatatcctccgccctccggcatgaaactcgcaatctgtgaatgagtgctttcattgaaaataactccatagaatacactatctataatattacctaaagcaccggtcagaatcagagccacacaaacgatatatccggttttgaagcctttctttacaattttatatagataccaaccgattaatgcaactgcaacaatacggaaagtagtcaggaataatttcccgaaaatctccataccgaaagccattccgttgttctcggtgaaataaatataaaaccagtccgtcacacgtatgctttcgtgccagtacatatgagttttaatccagattttaatgatctggtcgataatcaatacggaaaagataacgatcagagcgattgttcccttcgtgaatagtttcttcatgcgttcattataaattaaacataacgagctacaagtgccgtgcgtcaacattgcgcagctacttgtagctcgtcacccgtagcttgtgtagctatctattattttttaccactgttcttagcttcaatgctcaatgtcgcatgaggaacagcgcgcagacgttctgccggaatcagctttccggtttcgcgacaaatgccatacgttttattctctatgcgtactaaagctgcctgcaatccctgaataaacttcagttggcgttgtgccaaacgggtcgtttcttctttggaaagcgtattagctccttcttccaacactttatatgtaggagatgtatcgtcagtatcattaccgtccaatcccatcaaactctttttcaactgttcatagtcacgttgtgctagttccagtttctccataataatggcacggaattcttcaagttccgcatctgagtatctagtcttttctgccataatcttacaattttaaaaggttaatcaatatagtattagtcttttatcacattcacaaacagtgagaaatcgtcaaagctaagctctgtaccgtctttcacctcatcaacaagttcaagagatgtgcctaaaacctggttacaaatataagtattatattcatttaccgcatcatctgtttgtgtatttttcgagattgttatttttattttatctgtaatctcgaaaccgcttgatttacgtatattttgtatacgatttaccaattcacgggcaataccctcacgacgtaactcttcggtaactgtaacttcaagtgccacagtcaacttgccttcattagcaaccaaccagcccggaatatcttcactgataatttccacgtctgagacttcgataacggcttcctctccattcaggttcaaagtatattttccattcttttccagttcggagattgcttcctgcgacatttctgcaacggcagcagctacggctttcatttgttttccaaatttcggccccagtttcttaaagtcacatttcactttctttaccaagacaccggccgcaccgtctacgaacttgatttctttcacattcacctcgttcattatcaggcttttcacagcttcgatatgtgctttctgctcttcgtccaacaccggcaccatgatacattgtagcggttgacggacttttatattcactttacgacgtaatgccaataccatagaagtaacgtcctgtgccatttgcatacgggtttccaattccttatttatcatttcttcctgatatttagggaattcagccaagtgtacggatactacattatcacgtcctgttgctgtaatcaaatccgtatacagacgatctgcatagaatggagaaatgggggccattaatttagcaaccgtttcaagacacgtatataatgtctgataagcagacagtttatcttgtgtaaattcacctccccagaaacgtttacggttcaggcgaacataccaattggataagttatcgttgacaaagtcggaaatcaaacgccctgctttagtcggttcgtattcgttataacaagtatctacttcttttatcagcgtattcagtacagacaaaatccaacggtcgatttccggacgttctgccataggcacatcagcttctttatactcaaatccgtctacattggcataaagtgcaaagaacgagtaggtattatataaagtaccaaagaacttacgacgaacttcttccactccttctacatcgaacttcaaattatcccacggagaagaattggtaatcatgtaccaacgtaacggatcggaaccgtacttttcaatagtcgtgaacggatcgacagcattattaaggcgtttggacattttattaccattcttatcgagtaccagcccattagaaataaccgctttataggatacactatcaaataccatagtagcaatagcgtgcaatgtaaagaaccaaccacgtgtctggtctactccttcagcgataaaatcagccggatatacctgacggctatccaacagttctttattttcgaacgggtaatgaatctgcgcataaggcatagcacccgagtcgaaccatacgtcgatcaagtcggattcacgtttcattggctgaccgtctttcgatactaatataatatcatctacataaggacggtggaggtcaatcttatcataattttcttcagtatattcgccgggtacaaaacctctatctttgtaaggattggacttcataaatccggcagctaccgatttttctatttcattgtataattcttctactgactcgatacacaattcacctgtaccgtcttccgtacgccagataggtagcggagtaccccaataacgtgaacggctcaggttccagtcattcagattttccagccattttccaaaacgtcccgttccggtagattccggtttccagttgatagtcttgttcagttccatcatacgctctttgcaagctgtagaacggataaaccagctatccaacggataataaagtaccggcttatctgtacgccagcagtgcggatagttgtggacatgcttttctattttgaatgcctgattgtttgctttcatcatcatagccagaacaatatccagagattcggcggcttgggcagctttctcatcatattttccgtctatcataaacacaggattgtaggcgtttttcacccatgcaccttgatattccttgtatttttctacatccacacattcttttacaaaattctcgtccagttcatccaacaggtagaatttaccagtcaggtctaccattggacgagtttcgcctctcttattaatcataaaaagcgacggtattcccgcagcacgtgccacgtttgcgtcgtctgcaccaaatgtcggtgcgatatggacaattcccgtaccatcttctgtagttacatagtcgcccggaattacacggaatgccttattactagccttccaatcaccgtcttctgacacttcaaccggttttacccacggaatcagttgctcatattccatgccaataaggtcagtacctttgtattcggcgattactttaaatggaaccagtttatctcctgccttataatcttccaatttcaagtcagcagctttggggttgaaaagagcattcaacaaagcctttgccaaaacaaccgtgataggttctccggtataagcgttataggattgcacagcaacataatcaattttcggtcctacacaaagtgctgtatttgaaggcaatgtccaaggagtagttgtccatgctataaaatagggagttccccactctgtcatttccggtttaggattcttcatcttaaactgagcaaccactgtcgtatcttttacgtcacgataacaacccggctgattcaattcgtgcgaacttaatcctgttccggcagccggagaatatggctggatagtatatcctttatataacagtccttttttgtacaactgcttcagcaaccaccacaatgtttcgatataacgattatcatacgtgatatatggatgtttcatatccacccaataccccatttgatgcgtcaaatcttcccattctttggtgtatttcattacgtctttacgacaagctgcattgtagtcggccacagagattttcttaccaatatcctcttttgtgatgcctaatgctttttccacactaagttccacaggcagtccgtgcgtatcccaaccggctttacgcttcacctgataacctttcattgttttgtaacggcagaaaatgtctttaatggtacgagccattacatggtgaatacccggcattccattagccgagggaggtccttcgaaaaatacaaacgaaggacagccatcacgttctgtcatactcttggcgaaaactttgttttcgtcccacttcttcagtacatctttgttcacctgcgaaaggtcaaactgcgaatattcagtaaatctcttacccatagctgtatctacgattttactatttacaatttacaatttgaggggtatccccatttttaagggtgcaaatttacaaaaacatttgtttagttgagcaaaaagctaagacttttaatcggaatcatgtgaagttaacgattataaatagctgtcggcctaaacaaaacggaaatctccttgttttagtgggaaataaaaaagcactcaattatgaattacggtatcagtattttattcagagcaatccctttggcgatggcactcttttgcttcggatacggagcgtttatttatggttatggagatgcaggaaaccgggtcgtagcaggtcctgtcgtgttttcacttggtatgatatgtattgcactgttttgtacagctgccactattatccggcaaatcatacatacctataatgaaacaacaaaatacattttacctattgtaggatatttggcagctctaatcactgttatcagcggtatctgtattttcagtaatgcgacctctccttccgcctttgtcgcaggtcatgtaataaccggtgtaggatttatcacggcttgcgtagctactgccgctacctcttctacccgattctctttgattccggaaaactctaaagcaacaggaaatgaggtcccacaaggagcgttttctgtgggtcagagacgagcaatgatcattcttgcaatcgtcatatctattattgcatgggtatgggcattcgttttattaggcaacagccactctcatcctgcttattttgtcgcaggacacgtaatggtagggcttgcttgtatttgtaccagcctcatagcattggtggctactattgctcgtcaggtgcgaaatgattattcggaaaaagaacggaataaatggccgaaactagttttattaatgggatctatttcttttgtatggggattattcgttattttggcagattcggggagtgcaaacggtaccaccggatatatcatgcttggactgggtcttgtatgttatagtatttccagtaaagtaattctgttggcaaagatatggagacgggaatttaaactagccaaccgcatccctatgattccggtattaacagcattgacttgtttattcctggctgctttcgtattcgaactcgctaccgtacatgcagattatttcattccggcacgtgttctagtaggattaggggctatctgcttcacactattttctatcgttagcatactggaaagcggtacttcttctaaataaaaatatagcgtcactatcctaaacacatagtgacgctattcgagatatatggtgacgctattttaacgggataacgtcactattttatttttttaatttcacttcatagacatcatttctacgatctttcaaattgcgtacactaccgtatgtatgtaacgcactcaataaatccagatcgacatccgaaaccaatatcatttctgtattcggagtcgcttccgctcgttttccgtctgtcggaaaagcaaaatcacacggagtaaatacacccgattgggcatactgaatatccatattgtgtacgcgggggagatttcccacgctgcctgcaatgacaacaaaacattcattttcgatcgcacgcgcctgagcacagacacgaacgcgggaataggcattttgtgtatccgtcaggaaaggtacaaacaatatctgcattccttgatctgccattagccgggagagttccggaaactctacatcatagcaaatcaaaacaccaatcttagcacaatctgtatcaaaggtttgtagtaattttcccccactcaatccccaacttttgatttcatccggagtgacgtgcattttttcatacatttcgtatgttccgtcgcgacggcaaaggaatcctacattataaagcagcccgtcttctttcacatagggcatactaccggtaataatgtttatattatagctaatagccagatttataaaccgatcacgaatctcatcggtatattttgccaatccgcgaatagcctgcgattctcctttatcattatacttcgacattaaaggcgcattaaagtattccgggaaaagaacaaaatcacttttatagtctgatactgcatctacaaaaaattctacctgttcgaacagatcatccagtgttttataactacgcatctgccattgtaccaaacctacgcgaacagtagtttttggattgatatattcttgtgtaggaggttgataatagatattatcccactgtaacaaacaggcataatgtttagactcctcatcattcggcaaataattagtcattaccttgcggacatggaaatcatttgataattggaacgtaagcaccggatcgtaaatatcacgttgacgtacccgttcgatatattcttttggacgcatcttgtcagcatatttatgataattcggaatacggccgccgaacataatggctttcaggttcaatgtttcgcatagttctttgcgatattcatacatacgtcgcgccagacgcaatccgcgatatccggggtgaataaatacctctatgccatacagaatattcccctcaggattatgcgtattaaatgtttccttacccgtgacttgtgcatacgtatggtcattcttcaccttatcataatcaacaataatagaaagagcgcaacctacaattttgtcgtcaaccactgtaacaatctgtccttccggaaaaatattgattaatttctgaatctgtttatgggtccagaacacatcgctaccgtcagaataaacacgagtaaacgattgggataattgtgcgtaatcttctatttgaagattacgtatctgcactttattaattttaatcggatgttgttccataacaatacgtgtttttatataaagacagtgcaaaggtacagcttatcctcatatattgttctccaaagataagaaaataaaaatccgtaaatcacagattcctatatctgctgatttacggattttccacaagagatattatctgatttatttattcttcttccatagtttgctcatatcctccaatgtcttacctttcgtttcgggcacccaacgccaaacgaaaatagcagccgctacacagataattccataaagactatacgcaaacatcgggctgaaatcgtacaatgccgggaaagtagaagatacaatataattgaatatccattggaaagccacagcgattgccaccgctttaccacgaattgtgttcgggaagatttccgaaatcaatacccagcaaatcgggccccatgacatcataaagaaggcggcatatacgataaccgaaagtaccggaagaattccttttattgccatgctatcacacatcgctactgcaaatgcacctacggccataccgatagaaccgattatcaacagaggtttgcgcccgaagcgatctactgtaaagattgcaaccagtgtaaagataatattcacaacacccataataaccgtttgcatcatgccacctccttctgcacctgcattttcaaaaatacgaggagcatagtaaagcactgcattgatgccgatagcctgttggaatacggaaagcagaataccgataacaattactgccactccataagtaaagagtttttctgttttttcgtgagcagtagctttaatatcattaagaatttcttgtgcttttgtcttaccattgatcttttccagaattgaataagctttttcatcttgttgtaccaataccaaatagcgaggagtttttgggacaaagaacaataatagaccaaagaatgcagccggaaaagcttccgagccgaacataaaacgccagccttcaaatacagtccacatatcagattctgagctaactgataaaactccggcagcatctttcagaataataggattttggtgatcgcccataatcaggtaattcacaaagtatacaaccaacataccgaaaataatggcaaactggttgcacgaaacaagtgttccgcgaatgttggaaggagctatttctgcgatatacatcggacaaacagcagacgcaagcccgacaccgataccacctaaaacacgatataagttaaatgtaaccagcaaatccatattcggttttccatattcgaaaaacagaaattccggataataggaacctaatgctgaaaggaaaaagagtacggcagcaagtctcagggagttacgacgccctagacgggaagcgaatataccggagaacgccccaccaagtacgcagcctatcaatgcactggaagaagtgattccatgcattactttattatattgaaaatcggaagcggaaaggaagaatgcctccagacccttctctgcaccggaaataactgctgtatcataaccgaaaagcaatcctcccaggatagcaacagaagttatcgaatataggtagagtttactaccttcgttcgttgtattaatcatggtgtataagtagataagtagtgtgtagtagttggattagataatagtaaggcgataaagctctacctctatcgccttatatttgattctctattagcagtacatattcagaattgcttcgtaaagttcttgtttgccgctagtctgctttggttcaccgttcgctttagcataagcaactacatcttccaaagataatttaccttcctcaaattctttacctttaccaccgtcgaatgaagcataacgatcagacaacattttcttgtatggagattcgttcagcagagctgccgcactttccaatgcacgagccatagcgtccatacctgcaatgtgagcaataaaaatgtcttccaaatcagtagaattacggcgagttttggcatcgaaattagttccgccattacccaaaccgccattacggatgatttgcatcatcgcctgagtcagttcatagttgtcaatcgggaattggtctgtatcccaaccattctgatagtcgccacggttagcgtcgatagaacctaacataccgttatccactgctactgccaactcatgttcgaaagtgtggccagccaaagtagcatggtttacttcgatgttaactttgaaatctttatccaaaccatgagctttcaggaagccgatcacagtttccgtatctacatcatactgatgcttagtcggttccataggtttcggttcaatcaggaaagtacctttaaaaccacgggcacgagcataatcacgagcaatagtcaacatctgtgcaaggtgttctttttcccgtttttgatctgtattcaaaagagacatataaccttcacgaccaccccaaaacacatagttctgaccgtccaattcgatagttgcgtcaattgcattcttaatttgtacagcagcacgggccactacgtcaaaattaggatttgttgcagcaccattcatataacgggcatggccgaatacgttggcagtaccccataacagtttgataccagtttctgcttgtttctgttttgcgtatgctatgatttcttttaagttagcttcatattcttcaatgctagcaccttctgaaaccaagtctacatcgtgaaaacaatagtattcaatacccattttctgcatgaattcaaaacctgcatccattttatcttttgcagcctgtataacatctgtattaccgttccaagggaacagttttgttccactaccgaattggtcgccaccttcagcgcataatgtatgccaccatgccatagagaacttcaaccaatctttcatcttcttgccgttgattactttttcagcatcgtaataacggaatgccatagggtttttactatctttaccttcgaatttaatcttttcaattcccgggaaaaattcttttgttgccataattctttatattttaaatgattatttatattgttacttgttatctgagttgaaaatagaaattttatcgaccattgatttttctagacgatatttccatttggcgtatgcatctgcatattcttggtgtttagccacattaggttcgataatatttagcttttcaagtgttgcaaaagcctcattattatccttgtagatacctgcaccgatacctgcgcctttggcagcaccgacagagccatccgtgtcataaagttcgattgtagcccctgtcactcctgccaaagtgtcacggaagatagaactcaggaacatatttgcgtgtccggcatgaatcatctttaccggaatacccatttgttccataatatctataccatatttaaaagaaaacacaataccttcctgggctgcacgaataatatgatgtttgccatgagtattaaaatctatcccacggatactacagcctatctccttattattcagcatacgttcggcaccattaccgaagggaagaatgctgattcctgcgctacctatcggagctttggaagccagcacgttcatttcattatatgatattccttcaggtgcaatagtacgttttacccatgagttaaggatacctgtgccgttgatacaaagcaatactcccaagcgggtctgctctttcgaatgattcacgtgcgcaaaagtgttgacacgtgactgcggatcataattcacttccccattcactccataaacaactcctgatgtgcctgctgtagaagcaatttcacccggattgaacacattcagagaaagagcattattcggctggtcaccggcacgataagtaatgggggttccttcttttaatcccaattctttggctgctattgcatttacacatccttgctcggcaaaagtcggtttaatatcggcaatcaatgacgaattgaatccataataatccatcaagaaatcggctatacgattgtttttgaagtcccagaacataccttccgaaagtccggaaacagttgtacagatttctccgctcaatttcatggcgatataatcacctggcagcattattttgtaaatctgttcatagatagccggttcattctgtttaatccaagccaatttggaagcggtaaagtttcccggtgagtttaggagatgagaaagacatttttcttctccgatagtttcaaatgccttctgaccacaaggcacagcacgcgaatcacaccagataatagcaggacgcaatacttgttggtctttgtctacacataccagaccatgcatctgataagagataccaattgccttaatctcagccgcactgactccggattcattcataatggcttgtgtagacaactttaagttctcccaccagctttccggatcttgctccgcccaaccgggattcactgcaataatttttgcctctgttttcggaaagaatgccgatgatacacatttaccagtttcagcatttaccaagctcgcttttacagacgagctacctatgtcataacctaataaaaacatgattttatttacgatttaacgattttcaattttattacttagatttaccaaacacccggcatatatcaccgtctcaccttattgtatatcttcttatcgaacttataatagcgtgcggcacgatgggctactccttgttgcttttcttccaaaggaaccacatattccatcattgctatttttttatggaagttacgcacatctacaactttgtcatatactagttcaaaaagagttctcaattgcgcagctgtaaacttacgcgaaagtagttcgaacaacattgaagggttaaattccacaaactgacggatgtatgtcattgcttccttaataatcagattatgatcgaacgccaatgtctttacttctttcagagcaatccaacaagcctgatgctcgtccagattcttatccaaagttctatctatcttaaccattgacaaatatgcaatagtcacaatacgctctacccttgactgcattgcccgttccaaccagcgaacatctttcggattactcgttctgtttttggaaccgaatgctttaaactgcatcaggtttacatttttaagtcctgtcaattcatataatacgcgctgtgcagcctcgtccagatcctcatccatataaataagacttccgggaagtttcatatcgtgatatacttctccattatcttcacctgcacgtttcacaagcaacactttcagttgttcgccgtcaaaaccaatcactacacaatctactgatatatgattgttggccaaaggtgtatttttctgtatattctgcatatccgtttttttaatatggcgcaaatatagaggctaatattcgcttaaacaaaaataattaatatgctataaaacattgtttatcacataaatacatatcatatattttacaatatcaatacttagtgttatcttatgaattacaatatgtattttagtcttttccaggaagagtaattgtataaagtacaaaaaccagattgatgctttattttcagtacttttcataatctatagaataaattcagatagggatacttattgtactttaaacgatatgtcattttgtaccttatcgttttttattctatctttgtatcgtaactattaaaaaatccaaaatggaacgtcatccagtcattttatccattgctggttccgattgttcgggaggagcaggtattcaggcggatatcaaaacaatctcggctttgggaggctatgcagcgtcagtcatcaccgcagttaccgtacaaaatacattaggggtacacgctgtacaatcagtgctgcctgagattgtccgtgggcagatagaagctgttatggatgatttgcaaccggttgcaatcaagataggtatggttagtgacattcagatcgttcgtaccattgtagactgcctgcgaaaatatataccggaatatattgtttatgatccggtcatggtgtctaccagcggacgaaaactaatgtcggacgaaactatagaagaaattaaaagagaactgctcccactcgtcactttaattactcccaatcttgacgaagcaagtgttctgacagataaaagcattcataacatacatgaaatgcaggaagcggccaaaaggttggtggatgagtatcagacaagtgtattaataaaaggggggcatttggagggtgacagaatgtgcgacctcttacatacgtcagaatcgatcttccatatatatgaggagaaaaagatagaaagtaacaatttgcacggaacaggctgtaccctctcctccgctattgcgaccaacctggcaaaaggctatcctttacgggaatctatccaacatgccaaatcatatatcactcaggctatcattgcaggcaaggatttgcacatcggacatggcaatggtccgttatggcatttcccggattcggttgcacaaatatgtacattttgtgcggtcgtatcataaaaatccgtaactttgcacccgcaattaaaaatcaattaaataataaagatatgaaagcattcgtttttcccggtcaaggtgctcaattcgtaggaatgggtaaagacctgtatgaaaattcagctttagctaaagaattatttgaaaaagcaaatgatattcttggatatcgcattacagatatcatgttcaatggtacggacgaggatcttcgtcaaacgaaggttactcaacctgccgtattccttcactcggtaatctccgctctttgtatgggggatgatttcaaaccggaaatgacagcaggacattcactcggtgaattttccgcattggttgctgccggagctttgagctttgaagacggtctgaaacttgtttatgcacgtgcaatggctatgcagaaagcctgtgaagcgactccttctacaatggctgctatcatcgcattgccggatgaaaaggtggaagaaatctgtactaccgtaaatgctgaaggtgaagtttgtgtaccggctaactacaactgtccgggacaaatcgttatctccggttccgtaccaggcatcgagaaggcttgcgaactaatgaaagctgccggagcaaaacgagctctcccattgaaagttggtggtgctttccactctccgttaatggatcctgcaaaagtagaattggaagctgctatcaatgcaacagaaatccatactcctaaatgcccggtatatcagaatgtagacgcacttcctcatactgaccctgttgaaatcaaaaagaatctggttgctcagttgacagcttctgtacgttggactcaatctgttaaaaatatgattgccgacggtgctactgacttcacagaatgtggaccaggtgcagtattgcaaggtctgattaagaaaattgacggtactgttagtgctcatggcattgcataaaatcaataaatacagtatttattagtttacagcgtgttggcaattctgccaacacgctttttttattccgaatcttcataccaaaaagagagtgatatgctctaaaacattcaggtagatttctttttcgtaaactttccgtatcttgcttctgttttattagcaggaatcatttactcaaatttgtgagccatgaaaatacatgaatatcaagcgaaagagattttctctaagtatggaatacctgttgagaggcacactttatgccgtactgctgcaggtgttgtagctgcatatcggagtgtaggtgcagatagagttgtcattaaggcacaggtattgaccggaggccggggaaaggccggaggcgtcaaactggtaaacaacacggaagatgcttatcaggaagctaaaaatatactcggaatgagtattaaaggccttcccgtcaatcagatattggttagcgaagcagttgatattaccggcgaatattatgtcagtttcactatcgaccgaaatacacgttccgttattctaatgatgagtgcatccggtggtatggatattgaacaagtggctcgtcagacaccggagaaaattattcggtattcaatcaatcctttcattggcattccagattatttggcacgtcatttcgccttttcactttttcccaaaacggaacaagcaagtaaaatggctgtcatcctgcaagcactttataaaatcttcatggagaatgatgcctctttggttgagatcaatccgttagcgctaacaacaaaaggtatgttaatagctattgatgccaaaattgttttcgatgacaacgctctatgtcggcatcctgaaatacatgctttattcgacccgacagaggaagaaaaggtagaagccgacgccaaagaaagaggtttcagttatgttcgcatggacggtaatataggttgcatggtgaacggtgccggactcgctatggcaacaatggatatgattaagatttatggaggtaatcctgccaactttcttgatattggcggtagttccaatcccataaaagtagtggaagccatgaagcttctattacaagatgaaaaagtaaaagttgttctgatcaatattttcggagggattacccgttgtgacgatgtggcaatcgggcttattcagtcattcgagcagataaagagtgaaatacccatcattgtccggctaacaggaacgaatgaaaatatcggccgcgatcttctacgaaatcatagccgttttcagatagcaacaactatgcaggaagcagcgttaatggctataaaatcataatgcgtaacaatatcaataaaaagtaaaaaacaattatgagtatattaatagataaatccacccgtttgattgtacaaggaattactggtcgggacgggctctttcatgccaggaagatgaaggaatatggaaccaacgttgtaggaggtacttctcccggtaaagggggaactgatgcaaacggtatcccagtgtttaacaccatgtatgaagctgtggaacagacgcaggctaatacttctataatctttgttccggcacgttttgcagcagatgctatcatggaggcggcagatgccggtatccggttaattgtctgtatcgcggaaggtatccctacactggatgtcatcaaagcgcatcaattcattaaacaaaagggggcaatactggttggtcctaactgtccgggattgatttctccgggaaaaagtatggtcggtatcctcccgggacaagtttttcagaaaggaaacgtgggtgtcattagccgtagcggtacacttacgtatgaaattgtatatcacttaaccgctaatggcatgggacaatccacagctattggtatcggcggcgaccccgtagtagggcttcatttccgtgaactgttagaaatgttccagaatgacaccgaaaccgaagctattgttttaatcggtgagattggcggaaatgcggaagaacaggctgccgaatatattcgtaaccatgtaactaaacccgttgtagcattcatcgcagggcaatctgctcctttgggaaaacaaatggggcatgcaggagctattatctccggaacttccggttcggctaaagaaaagatagaagcattagaggcagccggtattcaggttgcacaggagccgtcggacattcctgcattattaaaagcagcaaaagatacaacgagagatattctgaaattacgagaacaagaactggtagatttggaactggaactcaataacatggtggatgatgaagaaaacaacaacagagattaacagaaagaagggcgtgttagtttcctgacacgcccttctttctatcactattatttagttttagttcttcggcaaagcttctttcactaccattgaacgacctacgtattctgcgccattcaactgtttgataacattattagcttctgcatcatccggcatttcaacaaatgcgaatccttttgatcttctagtttcacggtctgtgattaactttactgaagcaactgttccatactcttccattacatttctcaagtctgattccttaacattatagctaagatttccaatgtacaaattcataaaatacaaatataaaaaattaataattcaataagaaagttattggaaaatcttaattagaaatggatatactcaaataaatgagaagattcacgtaaaataatcaaatcgtaataaaccttattattgttgttggttgcaaaggaaagcattatttggcgatattgcactacattcctctctttttcttttcataaaacatcttttttatgaaattaggtcaatacttaacgttcatattcctctttcccttctatcaagtaatcaaaatcgattgttttcttcggatatatcctcaaaaaagaattttaaagtacgagtactgtagaaatctacaaataaactgttgtgataagacagcatatctaaaggaatgaaaaaatatctgcctaataaggaagtccggtttaaataatcttttaaaatcatccgcaattaggcataatgtcactcttttcataaattcgtcacctattaaggcacgaaaacaatctaaccaaacatgaaaaattttaatcactatgccggacgcgaggaattctccgcatttaaagacttctttttgacacatgggcaatgtaaagaaatgaagaaaaaggaatatttcactctgcagggagctttggctacacatggagcttacatagaagaagggttatttcgatatatctgtacagacgacagaggatacgagcatattgtcggttattcttttgccggagagtatgtaggtgactatccggcatgcttgaaaaaagagaaagctatggtaagcatccaggctgcaagtgatgctcgaatttactatgcttctgccgaagatatgaggaatttcttctctacaaatgaaatgacacaaaacttagaacggattcttgcagaagagctctttgtacaaacctatatgcgtctattagacatttattgtaaaactcccaccgaactgtatttagatttagtgaaacgctatcctgattttcagaattttattactctaaaagaagtagcctctttccttcgagttactccggaaacgattagtcacatacgtaagaaattcgaataataactactaataaaactatccgacgatgaacgtagatcaattggtttattactaaaaaatgagataaacaaaaaattcccgattcatcacgaaccgagaatttttatgagttatttatactacattcgaagttttgctttattctttcacttcttcacccttttcattcatcaggactgttacttcctgcgaatctttagtagtaagaattactttataaaccttaccgctctctttttccgctacataagcttctttgattgtagcaccttcatagttcttggcaacagcctgtgccactgcttccggtaactcttttacatcaatcttagtaaactcatcctgtggaacttgcacctgcatttctacagatgtagtgttgattacttcctgtgcaaatgctacagaactacctaatcccattactaatgctactgctactaatacctttttcataatcgtaattttttaagtgtgaattataaaaaccattatttattatcgctatacttatcatattgcaaaacggataccaaatatcagctttttacatatatcgttaaaaatcagacgaataaaaagtaggcgggttctatctgattgtggaattagtgtagaattatgtggaagtgaggagtgcaattggggaaaataaaagcctatcttgctttgagaagacaggcttttactcatattatcagttactacattatccgcaatggaaatatttatgaaccaaatcaagcatttcctgcggttttccgtccagatccgcacgtagtgtcttatcctcataattgcgaagtttacggatgatgccgtcaatcattgccgaactaaatacattgtattgttcgaaaatagcccgttgctgttccagacaatcggcggacgcaacacagctatccggtaattgagccaatgctttcagcttatcttcgttttctttctggtgaatatttacattcacatacgtcttttcagccagttccaaagcattttctatttcaaaaccatgacggcaggctacagccagtccggcaagcagttgatataaatctgccgaaccgtccggtgaacgcatttccacagtctgcttttgggtggtatcaaaatagctttccgtttctaacggattcgctaatgtacacatatccttcttggcagcccatcccaaaggtacacgtaccaatacagaacggttgcggtcgccccagcaaacattcgttggtgcttcctggtgcggaacaagacggaagtatgaagtaggatttgtatttccgaaggctgtgattgaaggcgcaagctccatcattccagcaatagccttccgggctgtttccgacaaaattccgtcttttaacatctgattctttccgtcctgcatgatacgcatatggacatgcagaccggaacccgctttacctgctgttatcttaggagcgaacgtaacattatatccatatttgaatcctaagttacgaattacccatttggcaatcatcaattggtcggcggcctgttcgacaggaaccggcaaaaactctatttcattctgctcatagatatagccttccaaagtaaagttgcctacttcagagtgtccatacttaatttgcccgccagtttgtgagatataagacatacattgtgtacggaactcattaaatttggcataaggtcccgattcatgataaccacgttgatcggttgcctcaaacatacccgtatccggtgctatcacataatattccaactctcccattgcctgaaactccattcccgtcacgtccgtaaatgctttgctcgctttatgaagcgtatattccggtgaactttccaacggttctccatccttattgaagaaagaacaaaggatagacagcgtaggtatctcagcaaacggatcaacaaatgctgtgcgaaaccgaggaataacataaagatcactacttcccgcttcgataaaagagaaaaggctggaaccgtccacccgttctccacaggtaaggatagcttccagataagcttgattgttaatgacaaaattcaaagttttcagacgaccatctcccgcaggatacatgaagttgaccatacggatgtcgttttgttggataaatgaaatgatgtcggctttggtaaattcagaagtcggcttctggagaaatgccactaatttattggcattcattgataactcttgattcatgatcggttgtttttcgttgttgtatgattaaaaacggtttgttaaacgccaaagataaggaaaagttggaaaaacgactttaaagagagtaaaaaactatctctatgtcgttattaaaaacgctttaaatctctttttctacaaaaaatattccggtgtcattattgtaagtcacggttgcctatttccatattgactacggcataggctacagactggttcgactttctcttgtccccgtaattgcagggctgcgcaaaataatcttatatattggtaaatacctcatctatcagataaatataagcaattattcttcaaaacaggggtgaaaaagatcttatttaaaaatgaaatactacttttgtaaaagatatcaccttatatataatgttatgcaatacatttacaaatatcagtcccctatcggtggaataacaatcgcaagtgacggtagctctttgacaggtttgtggtttgatggacagaaatattttgcagcttcgttgtctccggaacacgaagaaaaagtattgcccgtattcgagcaaaccatagaatggctcgattgttatttcagtgggaaaaatcccggtttcatgcctgagatacacttggaaagtactcctttccgtctctccgtatgggaaatattaaaaaaaatcccttacggcaaaatcattacgtacaaggatattgctaaggaaatagctcgcctaaacggactaccgtccatgtcgatgcaagcggtgggcaatgcagtgggacacaatcctattagtattattataccctgccaccgggttgtaagttgtaacggcagcctgacaggatatgcaggcggtatttctaaaaagatagagttgctcactcttgaacaggtggatatgacaaacctgttcgtaccgaagaaaggaacagcactgtaaatccggaaaatgtcctttgcctgaaaaactaattgattgctccgcctgttttattttcagtagaaacattcaaataacaaacccatgaaaaaggacattttaaaagacctgcttgctaaacccggaagacaatattccgtctccgatttcgatccgtcatttatcggcgaactatccaaacaggatgctaaaggtcaactgactaaaaacgtagagaaactttccgaactgcaaagcatgctctacgcccagaatcgctattcgattcttattatttttcaggctatggacgcagccggaaaagacgggacaatcaaacacgtcatgtccggtatcaatccgcaaggatgccaagtattttcgttcaagcaaccttctgccgaggaattggaccacgattatctctggcgtatcaatcgttgcctgcccgaaagagggagaatcggaattttcaaccgttctcactatgaagacgtgcttatcgccaaagtacatcccgaaattatactgtccaacaaattgccgggtgtagaaaccatcaaagacattgactctgatttttggaaacgccgttaccggcaaatcaatgatttcgaacgttatctgacggaaaacggaaccgttgtcctgaaattcttcctgaacgtatcaaaagccgaacagaaaaagcgtttcatggaaaggttggatgacaaaaccaaaaactggaaattttcttccgcagatgttaaggaacgccagttttgggatgagtatatgaaagcttatgcagatgtactaaccgaaacatctaccgaactggctccgtggtacgtaatccctgccgacaataaatggtttatgcgctacgcagtaggacacattatctgcgagcggatgaaacaactggacctgcattaccccaaactatctgaagaaggattaaaacaactggaagattgtaaaaaaagtgtgtccgatattaacttctgattcacttgcacttatccttttttattctaactttgtagagcaactatgtataaacaaaaaatgataagctatggacatccaaacatttattcaaaacttccgggaggcattcggagagaaggccgaactgcctcttgtattctggtattcggacacgcaggaaggaacggcggaaaaaataaatggctgtttctttaaaggtatgaaaacggcaagagaaggcggtatcatcagcctgaatgccgaaacaatcggctgtggtggcggcaagttctataccggttttaccgaaatgcccgaacacgtcccgacttttgtctcattaaaagagcggtacaaacagactccgcaaatggtcatcgactttatacagcaaatcggagtactcaaagcagaaaagaaataccttcattttgcgcgtatagacaggatagaaagtctgaaagaagtggaaggtgtcgtattcatagccaaccccgatatgctttccggacttaccacatgggcttattatgataataatgctgaagacggtgtagtttccatgttcggttccggttgtagctgcatagtaacgcaagctaccatagaaaatcgaaaaggcggcaaacggacattcatcggtttcttcgatccgtcggtacgtccctacttcgaacccgataaattgagctatactatacctatgtccagattcagggaaatgtgtggcacaatgcgccaaagttgcttattcgatactcatgcttggggaaagatccgggaaagaatggatagtgaatagagcaaaaaacaggtcaaatagtttcaaataggtatgaaacttttccatcctgtttttaatataataagcagattgttctttaccggattaaacctttcctgcaaagaacagtcttatcctcaagatattattgttctattaaatataaaagttcttaacgaaaatggaaacatctgctaagctctactcgctgaattacagtaatgtaaaaacttacttgttcgctctgttgtttattgcaggcaacattgcacttccacaactatgccatctcataccttatggtggtcctaccctgctgcccatttattttttcacgttgattgcaggctataaatatggctttcgtgtaggattattgaccgcgattctttctcctgtcattaatcacttgctgttcgccatgccttcggaagctacgcttcctgttatgttgataaaatccactttacttgctggagcttctgcctttgccgcacgaatgctaaaatctgtctctttattgggcgttcttggtgtcgtgcttttctaccagattataggaatagcttttgaatgggcgattcttggtaatttctatgtagcagtacaagatttccgtatcggtactccgggaatgttgatccagtggtttggtggctatgccctgttaaaagcgattgcaaaattctaaactcaaaatagaaaaatggacagaagggactttttaaaaacagtagccataaccggtgctgctttgactatacagcactcggaagctatggaggtattaactcagactatcaataaagcaaacggagctaaccctgatctggtagcagtcatgggtggagagccggaagccatgttccgccgcgccataagcgaactgggtgggatgaagcaattcgttaaaccaggacaaaaggttgttgtgaagcctaacatcggttgggacaaggtgccggaactggcaggaaatacaaatccgaagttagtggcggaaatcgtgaaacaatgctttgccgccggagcaaaagaagtgaccgtatttgaccatacctgtgacgactggcagaaatgctacaaaaacagtggcattgaagctgtagcaaaagccgccggagcaaaagtaatgcccgcacatctggaatcttactacaaaccggtagatctcccaagcggcaaaaaaatgaagaaagcaaaagtgcatgaagcaatcctgaactgcgacgtatggataaatgtccctatcctgaaaaaccatggcggagccaatctgactatctccatgaaaaaccatatgggaattgtatgggatcgcggattctttcaccaaaacgacttgcaacaatgtattgccgatatttgtaccctgcaaaagaaagccgcgctgaacgttgtagatgcctaccggattatgaagactaacggtcctcgcggacgctctgcttcagatgtcgttttggcaaagggattgtttatctcaccggatattgtagcggtggacacagccgctgccaaattcttcaaccaagtgcgtgagatgccgttggatacagtaggacatcttgccaaaggagaagcactgaaagtaggaaccatgaatcttgacaaattaaatgtcaagcgaatcaagatgtaaatcaaccatgttaagaaagatacgtattggaatatcagcacttttttttgtactgattactttcttttttctcgatttcgcagaaatattacctaacagttttcatcgtctggtacacttacaatttgttccagccttgctttcattaagtgtaggtatcttattatttctcattgtgttaacacttttattcggccgtatctattgttcgacgatatgtcctatggggattttgcaagatatcattgcgcgcctgtcaaaatcaacaagtaaaaagaaaaaaagatatagttacagtcctgcaaaaaatagattacgttggagtgtgcttggggggactgtcatctcttttctatgcggattcacgtttatcgtaggactgcttgatccatacagcgcatacggtcggatagtagtacatgtatttaaaccgatatatatgctgggaaataatcttttggaatccgctttctccaagttcgacaattatacgttttaccaggtggatacttctattttaagtatttcatctcttttcattgcagtcgtcatacttacaatgatttttataatggcatggaagcacggacggacttggtgcaacacgatttgtcctgtaggaacaattttaggcttattaagccggttctcattattcaaagtccgcattgactccgacaagtgtaacagttgcggactctgcgctaccaaatgtaaggcagcgtgcatcaatagtaaagagcatactgttgattatggtcgttgtgtagattgctttgactgcctggggggctgcaaacaaaaggcattgatctaccaaccttcactctcccctaccgattcatccaaacgtcgttttctcgttgcaggactacttactgccggagcagttccgaaactactttcacaagttaaagaatccgttgcaagtctggaaggtaaaaaagtatacaaaaaagagaatccggttactccgccggggtctgtcagccgtgaacattttcagcagcaatgtacatcgtgccatctttgtatcagcaaatgcccatcgcatgtactgaagccagctttcatggagtatggcttggcaggagtaatgcaacctaccgtcagtttcgagaaaggattctgcaattttgattgtactgtttgcggagatgtttgtcctaacggggctattcttccgataagtgtaaagcaaaaacatcttacacaaatgggatatgttgtttttatcgaggaaaattgcatcgtttatacagacggaactagttgtggggcctgctctgaacactgtcccacgcaggctgtcgcaatggtgccttataaagacgggttgacgattccccatgtaaataaagagatttgcgtaggctgtggtggatgcgaatatgtttgccctgctcgtccgttccgtgctatctatattgaagggaatccggtacaaaaggaagcaaaaccatttaaagaaagcgaagagcacaagggtgaaatagacgattttgggttctgatcggcgtagtaccggaacaaagtttccatccggcatactaaaaactatccattatattccttctactttcaataaattcactaaattcgtggcgaattaaagacagaaaaaactcatggaggtatatacaaacaattggacgaaccggaaatatcagataggttatgctctaagtggaggatttattaaaggattcgctcatttgggcgtaatgcaagctctcctggagcatgatattaaaccggatattatctccggagtaagcgctggagctcttgcgggagtcttttatgcagatggtaatgaacctcacaaagtgctggattatttttccggacacaaatttcaagacctgaccaagctggtaatccccaagaaaggattatttgacctttgcgaatttatagatttccttcgtaccaatgtaaaagcaaagaatctggaagaactccagattcccttgatcatcacggcaaccgatcttgaccacggacgtatggttcattttcaccgtggttccattgccgaacgggtagctgcttcgtgctgtatgcctgtcatgtttgctccggtaaatattgatggaacgaactacgtagacggtggattgatgatgaatctcccggtttccactctccgtagagtctgtgacaaggtagtagcagttaatgtaagcccgatcatggcgcaagattataaaatgaatattgtcagcatcgctatgcgttcgtttcatttcatgttccgtgccaatactttccctgaaagagaaaaatgtgatttgctgattgaaccttataacctatatgggtatagcaacacggaattggaaaaagcggaagaaatcttcgagcaaggatataataccgctaacggagtgctgaatcaattattagttgaaaaaggaaagatatggaagtaatgcttcttattgaagtagttaatattagaaatgtaaaaatctactctatatgaataacgaaaataaaataattatctatcaagtgttcacccggctgttcggcaacaataataaccactgcgtctacaatggagatatagtcaccaacggttgcggaaaaatggcggattttactctcaaagcacttagtgaaatcaaaaaactgggtactacacatatttggtacacaggtattatcgagcatgctactcagacagattatcgtcgctataatatcagtccggatcatcctgccattgtaaaaggaaaagccggttcgccctatgctatcaaagattattatgatgtagaccctgacttggcgaatgacattcccgaacgaatgagagaattcgagaatcttgtacgacgtacacatcgtgcgggactaaaagttataattgattttgttcccaaccatgtagcacgccaataccattctgatgcacaaccggacgggacaacggaattgggagctaacgatgattcaagccagtctttcagtccctataataatttctattatattcctcaagcggaacttcgtgcccagtttgacatgaaagacggtgcgacagaaccttatcacgaattcccggctaaagcaacaggcaataatcgttttgacgctactcccaatatcactgactggtatgagacaatcaaattgaattatggagtagactaccagaatggaggtacgtgccacttttctccgattccggatacatggataaagatgttggatattcttctgttctgggcttccaaagacattgacggtttccgttgtgatatggcggaaatggttcccgtagaattttgggaatgggctattcctcaagtcaaagaagcatatccggacattctctttattgcagaagtctacaatccgaatgaatatcgcaattatttgttccgtggaaaattcgactatctgtacgataaagtaggcttatatgatacacttcgtaatgtagcctgtggatatgagtcggctgcttctatcactcattgctggcagagtctgaacggaattgagaaaaagatgcttaatttcctcgaaaaccacgatgagcaacgcattgcgtccgatttctttgccggtgacccacgcaaaggaatccctgcacttattgtttccgcctgcatgaatactaatcctatgatgatttacttcggacaggaatttggagaacccggaatggacagtgagggctttagcggaagggatggacggactactatatttgattattggagtatagacagcatccgtcgttggcgtaacggaggaaaatttgatggtaaaatgctcaatgaagatcataaacgtttatatgaaatttatcaaagagtgctgactttgtgtaatgaagaactggctattgcaaagggtgttttctttgacctgatgtatgctaatcaaaatggctggcgtttcaatgaacataagcaatatacttttatgcgaaaatacaagaacgagctattgtttatcattgtcaatttcgacagtcaactagtagatgtagcaatcaatgttccctcacacgctttcgactttttacaaattccacaaatggaatcctatcaggctgttgatcttttgaccggtgcgaaagaagaaatcagcttattgccatataaagctacggaagtttcagttagaggctacaatggaaagatactgaaaattgcattctgaaaaagacgagaaaccctatattcccctataacccgatcacaccataatgaccgggttattttatatgtatcattcaaacaaatagtcatgatagctgtttaggtagataaataatctcctaaaccataaagcttatgaagaaatttaatattatggcggttctgttactattttccatatcagtattagcgattgtacctcctgataatgtgcaggctaccttcaagaaaatgtatcccaaaacaaatgatatagcctggtcgcaagatgacggatactattgtgccaattttgtaatgaacggtttcaccaaaaatgtatggttcaatgcgcagggacaatgggaaatgacgcagactgatcttgtcagtctcgatcggctgacacctgtggtctataatgcttttacatttagttcttatgcaagttgggttgcggaagatgtgactatggtagaatttcctaaatggcaggcaatcattgttattgaggtaggacaagataatgttgacattaaatatcagttgttctatactcctaaagggatattgctaaaaacacgcaatgtcagttatatgtacgacattctcggtccgggcacattcttataaagaaagcccttgcaaatccaagtatagaaaatttgcaagggcttctttattaatatatatctacttcttctttctcaacactacggcagtacgtgcaggaatataaagtttcaaccattctttcttttctttcttatacaaaggatcggcaatcgtgaagtgaaccacagaatcatcggcaaagccattaccaccgaatgctatattatccgtattcagaatcacctcataagctcccggagctacaaggaaaccatagtctgtaaacgactgcttcggattgaagttaaatacaaaaatcaaatccttacgctcataagccaatacctggtcgccgtcattatgccatatttcttgtattggggttgcctggaaatccttcacactcttaatgactttcaacatttcttcatcgaagtcacccatatagtgataggctagattcttattgtcgaccagatcccattggcgacgggcatatttgcaagaccaaccgttaccctcacgcgggaagtcaatccattcgggatgcccgaactcattacccataaagttcagataaccaccgttaattgtggaagaggtcaacaggcgaatcatcttatgcaaagcaataccacgattgactatataattttcatctcccttctgcatgtgccaatacatatccgcatcaatcagacggaaaacaatcgtcttatctcctaccaatgcttggtcatggctttctgcataagaaatagttttttcatcctggcgacggttagtgacttcccagaacatgctggaaggtttccagtcctcatctatcttttctttgattgtcttaatccagtaatccggaatattcatagccatgcggtagtcgaatccgtaaccaccatcttctacttttgcagccaatcccggcataccggacacctcctcagcaatcgttatcgcttttggattcacttgatgaatcacttcattagccaaggtcagataacagatagcattatcatcctgatgtccgttgaagtaatctccgtaattacagaacgcttcacccaatccgtgactataatacagcatggacgttacaccgtcaaaacggaatccatcgaatttatattcttccagccagtatttacagttagacaacaagaagtgaacgacttcattcttgccatagtcaaaacaaagagaatcccacgccggatgttcacgacgccctcccggatagaaatactggttcggatcaccggcaaaattacccaatccttctacctcattcttcactgcatgggaatgaacaatatccataataacagcgatacccattccatgagcagtatcgatcaactccttcaactcatcaggagtaccgaaacgggaagaagcggcaaagaaactggatacgtggtaaccgaaacttccataataaggatgttcctgaatagccattatctgaatacaattatacccttctttggcaatgcggggaagcaccttttcacggaattcattatatgaacctactttctcttcctgttgtgccattccgatgtgacattcataaatcaacagaggacttgtgttaggtttaaaagtctttttcttgaatttataaggtttctctggggcccatacctgtgcactaaaaattttcgtctgttcatcctgaacaacacgggtagcccaagcaggaatacgttctccctgtccaccgtcccaatatacattcagtttatacaggtcaccgtgatgaatggccccttctggaagattgatttcccaaatcccattcttcagttttttcagtttataggtagccttttcttcccagttgttgaatgtacctaccatgtaaatatgactggcattaggagcccattcacggaaagtccagcctttggcagtacggtgcaatccaaaataaagatagcccgaagcgaaatccgacagcgtctgttttcctttattagtcagttcggcttctttatccagcacaaattgatgccggccggcaatagcgtcggcaaaaggttccagccaaggatcgtttttgataagattcagtgtcttttccatatctgaattaaattaggattatgcttttacttttacaattacttttttcactccgtccggggtaataccaggagcgtgtccgtcttgcgggaagaagatagcaaacattcccggtttcacggcaatataagtttcagctaatccttcaaagaaagtgatatctttttctacattgtatggagcatttgtcgggacacagtctttagcagcagtataccccatgatttctgttcccgacaatggaatttgaatatcaataaattcgttatgtgtttccagtttagcctcttctttagtcttaggtttggtctgtgcaatattcaccagcagatcttttcctttcagttcagtcttaccgatttccatggcttgaagatcatgagatttcaggaactcaatagcttgtgcaaacaaaggatttaaagacgcatatttctccagattttctaaagtatctactaccataagagttttatttaaaagtttatattctaggtattattcaaaatcgtcaattgtgtaattgataaagtcggcaaatcgcttgaattggcggaatactttatctatctgttccaacatatccggttgggcgaagaagtcatcggggacattataagaacagacatattctttacacttcaaataatcaatgtatttaaaatcttttggaaagcccttaggagcagttttcaggaagtcttcccctatcaccggaaagtatttcttaaactccggatcttctacgatcgcaacaaattcctcaatattgtcataaattgactgccgcacagcttttagtacgttagacggcaggcataagctccctccggcaagcatagatccagcaggttgcagatgcacataatagccacaatgatcggatttttttccttttgcattgatataaccgccaaaatgtattttatacggagttttatccgtagaaaagcgtgtatcacgataaatacgatacgtacaatctttaggttggatgcctcgaattgattcgtcgaacaaggagatacgggcaataactgttgctaagaaattttcaaactcgacacgggctgtttcatactccgccctgtgttcattgaaccagtcacgattattattcgcagaaagatcttttaaaaactgaaagataacgggtatgttcatctttatcattttctattattaccctacaaacgtacaaattttatttcatataaactacaaaacgcaacaaaaggacataaaaaaagcatcggcctggtaaaaccgatgctctaacacatttatcaaaaaaacagactcttctgtctctgacgtactttagctttcacaagtggagtacaatctcttttaattaatcttatatctaatactatgaaaaacacataaatataacagacgaaagaacacctttgttcaaaggttctctaaatatttctgttaataatagtttatagaattaaatgtttttcatcaatcggtatcacgatttgtccccaatcaatcatcgcattgaataacataatacggaaatagcttcccaactgtgtatgcaatatctccttttcttgaatcaaatgcttgtccagaagttcagcccgcttggttcccttgagtagcgggcacgacggagtaaaccatgtattgccgtcataaagagctatattggaaatagatgtatccgtcaggtatccgtttcttaccactaatatatcatcagccgtttctctctgggcgtacaatgaatttagttcttcccgattcgtacttttataagtataatcaatagtatccgacgtaaccagacgtaaagaggaaactttgcgcctctgataaggaacgtatgtaatttcttctatcgcctttccgtaaacaatccggcatttccagataccttccaatgattggggagaaataaattcacctaagtcaatatcggcaacatcttgccagaaggcggcacgagtccggttgcaacgttccgtatgataattgatattataaatctttccatcttctattcggatcgtttcaataaatgggcacatatactttctgtttcatttcattatattcattttccacatcactttggctggtaatcccacccccactcttaaaatacattttaccaccttcctgctccacaaaacggatcataactgcgctatcgaggtccttaccgtcaaaatagcccataatacctgtatagaatcccctgtcataggtttcagcctccttgataatctgcattgtttttttcttcggagctcctgtgatagaaccggctggtaaaagccggaatataatacttcccaaatttgtcagataatcatccggcagtacaccctgtatttcagaacttgtctgaagaatactcccttgattggtctgcaatttatcaatataccggtatcgggatacggatacttgttcggccaccatactcaaatcattacgaatcaaatctacaatagtggcatgttccgccgtttctttaggatcgttgattaatagccggtcagccgaaggggttgaagcattaatcgttcccttcatggggtaggaatatattcttccattatgaattcttataaatatttcgggagaaaaaaccgtaaaagcatctctgacccataatttatacatagcttttgaataacaatagatatctttcaaagtcagatttgtttctaccggagtgcgacaagtcaagttagtgagaaaactatttccggcaaagatgtttcgttggacaatatcaaacgaatgttgatatgtagccaaagattccgggaaagattgccaacgaagtcgctttcttgacaaaaaagctatattattctctgcaaacatgggttgattcgtaaaaccattcaagttatagagtatttcggcagggtctaccgaagatactgcttctatataagaagcatcctgctggtaattaatgataaaaataaaaggacgacaggattgccctaaatagttcatttgtctgatagcctgttcttttgtatataactgcatggatttgttctatttttaagtgaagcaaatgtacgcaaaaagtatagattagaaaaaggtgcaacaaaaaaagggttgccaccgtgtctatcgggcaacccttattatctatacgagatcggtcaaattacttcattgcatcctgtacctgaggaatcatctttttcacatttgcgttgtcaggagatacctttgctgcttcttccaagtaacctaatgcttctttaaatctagctgttgctttttctttttcagcagcatatttatctgcatcagagtttgctaaaggagttgcttttttcaggatattggctccgtcattataacacaatactccaaggctgtacaaagcatttgttttatatgatttatgatccagaggaattaccttcttgaaacattcttctgcttcttcagctttaccagctttttgggcggcgagtccggctttcaagtagtgtaaaccataattcttgatcattgttttattattcggatcaactttcaagccttcttccaatgtagcaacgtattcatctgttttcttcaatgcatccaaagccaaagctttacgggcatacgcattaccagtattaaacttcttctgaatagcaatatcaaagaaagttacggcttccgcatacttcttcacttcatctgctgctataccgcaatagtatgctgttgcagaatcctgattattagtttgtttcaaatattcgctgaacttagcgtaggccacaggataattcttagcattgaatgcgtcatttccttctttcttaatttgattaggatccgtttgtgcaaaaatgttagttactgcaatactaaatgcaaataaaaaaatcaatttcttcataactttatgtgttttttagttgtttatcgtccaaaagtataaggaataatagaaagacacaaccctatttttgtttttttgagctttttgaaacctatataacgttcgttattcttcgtaaaaacgggcttttattctcaaatacagcgtaaaaggaatcacccttttacgcctttctcggccgtcaaaggggtgatacacaaactgtttgggtaactacttttatcaaataaatatagtatacaacaagaaaatgtatagagggatatttaatgttctatgagggacaacagggaataaaatcaaatatactgtcacaagagttcttccaaatatctccttttattaacttcccgaaaaaaatgctattcatttgtttatctataaaacacgaattcagtccccacctaattaaataaaaaaaacttctttcataaaatactgattcatagcaccaaagaaaaatatgaataaaaaagttccagaaagtttttgagttttcataaaaagcactacctttgcatccgaaaataaggctggttccgtagctcagctggatagagcaacgcccttctaaggcgtgggtcaagcgttcgaatcgcttcggaatcactattaacatccggtaacagttaaatgttatcggatttttcttttaaatagctgatattaaacgttttactttcgccccgtttaacttttaataacctgcctgtgtaggcatatttgtaggcatatcccctctacaggcataaaataggcatataaaaatgacggcaataagagttgtaagacaaggcaaaaaaggcaaaaccgaccggctccccctgtatgtggaattttatatcaaccgcgagaaaataaggatcgcggtaaggttaagtgtcacctctaaagaatgggatgagcaaaacgaagtgataaaaggccgggacaaagaaagtaaggataaaaatttaatcatctccaatatccgttcacgagtaagcgatatatttgtccgtgcccgtcttaaaaatgagacgctgacaaaagaaagtttcttccgccagtataacaatccctccgattttggtaccttctttgattttgcacgggtttacctcaaacaaattagcaaaactatttctttcggtacctggaaacatcacgtttctatcatcaagaaactggaaacattcgcacccggccttgtattttcagagattacccacgaatttctcctgtctttctttgcatatcttcgcaaaataggtaacatggattctacggcatggcgtaacatggctactatcaaaatatatgtaggtgccgccatacgcggcggttatatggaccaggacccgttcgcggccataaagatacgtcgccccaaaagtgaagttatatacctgacggaagaagaactcctccgtctgaccgccttgtaccggtccggccgcctggaagaatgtacccagaacgtactccgtttttttctgtttctttgttttacttctttgcatataggcgatgcaaaagcattgcagataaaccagttcatagggaatgaactacactacacacgaggtaagacaaaaataccggtaactgtacccttatcggacccggcacgttatatctatgaatattaccgggccggacgtacaaaaggtaacttgtttatgaaccttcccacggatcaggatataaaccgggtattgaaaacaatagccggtaaagtaggaataacaaaggatatcagttcaaagaccgggcggcatacattcgctaccttgtattataagaaaacacatgatatcgtaacgctatcccaccttttgggacatagttctataactatgacaatggtttacgcacatgctctggaagatgaacgcgaagcgggaatacacgcctttgatgatatgttataactaaaagagtgaaggggaaacgtgtttcccgcttcccccttcactttttctactccaacgtataaacgctccagtctatcgcctttttaagttcccagccttccttttgtgtctcctgtatatgtttcacggcaccggtgtaaaactcttgtagttgctgcatacttgcaaactcgtaaaacgtcgggttgtcttcttccccgagcttgaaagtaacaggaaggttttccccgcctgtctgcaaggcaagatcgtacgccgtcttataattcatctggttctccatggaaagccagactttcaggccgttccatacgtacccgctttcgatcgtgtcggttatcttccggttataccattcattaataaccgccttgatttctgccagtgcgggtagatgatcgaacgtctcttccatgtaactacgctgcactccttctgctgtctctgtttcctggtaatcccacgtaatacgccagattccccggcggcggttggtacatcttaccggttccgccttgctgtctgcataaattcgtatcatttcaagtaaaatgtataattatcaatcctttttcacttacttcaccttcgcaatgtgcttcaaaaggcagttctccgtctcttgccgctgattcacaaatgaaaagtgtttcctccaggctggtaaaatactttctctccttgccgtcgagttccagctttataacagtccggtttccgtttttcgtcggaacatccttttcataatcaagtacgatcacatccttgttcatcagttcgggcgacttgatccttgccccggtaaatcgtttccgtccgtctttaggcttgtacttgtagcccagatcttttaattttttcattttctttcctgttagtttataaaataagttcttgcaatcggcatgttttgtaagcccgtaaaatgaggcggtcagctcctgcctgcgtttcttgcttttaaccttgtgcatcttgcgggcgaacttttgtttgttacgcttccttaaccgtacatgatccgggcgggttacatatcccaggaagtcgataccttcggtgatcgggaaaacggtatcattgcttttaatctccaggcgggctttacgggcctgttcatgaatgatatccctaaccttccaaaggtatttcttactaccggaaagcaccagaccgtcgtcacaataccggtaatagtgtgctactgcctcctgatcctttaaccggtgatccaggtaaatggatagaagcaaattacaaagcccctgtgatgatcttagcccgatacttacgcctttaggcatcatgcggatgcactcttccaggattccgattaatattttatccttgaacatctttttcactgcatccagcaaaatgtcctggtctacgctttcatagaatttcgttatatcgaactggtacccgaacagggttccttcgggatcatcctttatatctttaacgatatactgtaaaaggtcatgcgttcccctgtttttaatggatgcggaagtagtccggataaaacgtactttcaaatgccggtccaccacattcataacagcgttaagaacgatcctgtcctccagggaaaccgattgtacggtccttaccttcggcccgtcgtctacggtcatttcccgatatcctccgagcttgaaccgcccactcctgatccgctgcctgatcctctctactgccttcgggacatccgccagtattctacgcccggcaaagctgcgctttcgtcttcttttgcgcaataccgtttttatggcgtcctctatattggagtcctcgacaatctcttctataatattatcttctctccacatgataattaaattagccttcaattccccgggccgggcttcttcgaaaaaaattcctaccaaaccccattgccctgcgctttatttttcccctttccagccgtaaacggctgctgttggcgaggctcattcctcttggctccacgccggggacacgtccccactgttgtacgccaatctttaaggcttatgcgctttttctttatcctaattgtttgcaagccgaacgccgatgttcgcattcgtgttcgatgaatcgttattcgcgttcgcatacgaaacaccgcctaacgcgttcgcgttgttgttcgaccgatacaccacacgagtgtatatgaggaaatccgcctttgtactttcaggaagcaccggcacccgtcttacttccggacgcctgcgctacccgcacaacgttttacgttgctattttttatcttaatctgcctgatttatggctttaaaggccgcgacgctacccgcccagcgtatgatgcccctgaaggcaagccgaacgccgatgatcgcattcgtgtacgatgaatcgtgatccgcgaccacatacgaaacaccgcctaacgcgagcgcgttgtagaacgaccgatacaccacacgagaaagcccggtacccacatagaacctgtcgaaccaatgagaggaagtggaaccgccttccttggccgcaatcaaatccatataccggccccaaaccatgtgggtaggataaatatccgcattataaacagtaattccctgtacaacgcgttccgttccgtccggcatggtaataaaccaccttccgtccgccgccgtcttgtttactgtgacatactgcaaccattccgccttgtttccctggaaattctcatatcccagcacattgacggactgataatttacaccgtcccggtaagcaccttccgcctgtggattggaaccgcccttttccttataataagaaaccgtatcacgcatccccagcgcatttgtaaggcctgtcactttctggtaattgtttgttccatatccgcaaactccctgcgaatcggtattaccgtatttaaagaaatgcagattacccacatccttgtgcatctcccagtcgaacagctggaaacctttgcccctgttctgggcgtatttgactgcctggctctgtgaaatagttcctacacttgaaacaccactgacagaacgcagcacatcatcaatcagataggcttcataaacaccgcccaggcattccgtatgctctacccagtccggctcgatcgcttccacactttccgatgttgtgagtaaaacgaaatcgaaggccgccgaattaaggaaagtaaaggccagtttcgtagcccctacaggaacggcacaaaacagatacataccattgataaaaccgttcgcatttgaaacgctgatccgacttactattttcccggcatcatctataaatacagcaccgtaaagagtagaagcaaaaccgggaaaacgaacctgcttgtaatcccggacgtccaccagggcgaacgatccggattcgtattcattcttcgcctcttcaatggttgtgtaatccgtattcttacgaatcccgatcccttccgtcacatccagttcctcgcgggtaaatcttatactggtgtaccctgctgctgccggcgcatcctcattacttgaaataaaaccgtaaaggcactgattcagcacgtccgttactcccttgtaccagtaatgaggctcatatatgtaaacttcaccttccgatccggttaatactgcatccgtggcgttctccacgctgtcactatccgcgtatttatttcggttctcatcatgaagcgggtaacaggtcatttcaccctccgccgtctttttagccagaatacaacgtcttttcgacaacacttccaatatatgggaagacggggtaaattcagtattatagtcatatccggtagagttatccagattcgtaatcttttccccgtctcctaccgtctgatctatttttataccgacaaactgcggctgaatgatattcagttccgggaaatgtgcacaggtggcggcgtactcttcatccgacatggactgggtgagccggtacgtacctaccaggcggcacgtctgcacgtttcccccgtcttcatcaacgccgcccattgtcataagcctgcgaagcaaattaccgttcccgtccatatctataccggtaattcgtagatagctggtcgcactgcattgctgtaataacgtgttccagtcgatcaggctacagttatcaatcacaaggcgcgtgatatttgccgtaccttccagctgcagccctgcattggttagtttgttcaggtaccggagttcgagcgtctgcaaagttccgggaaggacgcaaacggccagaggcgcaccgccggcaaatgtcacaccggtaagggatgtatcaccggccaggaaggtttcaagtttggtattacttgaaaggtccataccggtaaaggaagaagatttaagtccggatatgtcgagttttcgaagattacggcaattacccaccagaagggcgttaaatgtcgtctgtccggcctcacaactaacattcagttcacgcaaggccgtgcagttgttcaggttcaacgtgccgacaatggcgtgggctacatccgtcagatcaagcccgcgaatacggcttgcaccgtagaaatattgcggatcgtttacaattaaatccgtgtccattgtcagttccaccacagccccggccgtttctgcaagtaccgcgctttggtgcggtgttccggacgtgtacccgtacccgtaataataccgttcggaggccgtaatccgaattttccggttatcgctgccgaacttgtatccgaaataagccgcgaagctgtcacgacggtaagtaccggccacatactgactatccaaaagggcgaaacggttctgaatggtataagtacggtgcgcataacggcttccctgcaaggcatacagataattataataactggttccgctgccggttgtcaccccttcggtaagcggaaggatatatttatattccgaatccttgttataaatccgctcgcaccagttgcccatttgttcctcgttaaatacttgcaggacatattcaaggctcatattgctacgcaaggtttccgccacttcacgcaatttgtccggacaagaccgtaccagttcccataaaacggaatcatggccggcaaaagcataactaccgatactatcgtcaaaactttcgtgggtaatggtatattcgtatttcagtaccgaatcattacgcacaccgaacagcgtgtccatatcgtaaggaaggaaataccagatcagagagtcccaagtcgccagcatcatgttttttgcccggttatccacagccataaagtaatcggtaatcagataccatgcaaacgggctgtcattaccgaaatactggttatattccgccaggaacttggcgggatcatccttacatgaatcgatccagttccaaagccttgtaactgccgccttgtcgtcctcgtgtgcatccgcccaggtagtgtccgccttgaaacgaaattccagcgcatcatcaaaagaagacatgtcggtagtcccgaacagacaaagggcctcggagttgttcaggaactccagacagatacatttgttacgctgcccgttcagggccgcttcgtcgttgaatccttcaattccttcaaaaccgtaaatgatcgcactttccgacttctcattattgaaattgtattttcccagataagtattcgcaccggtgccgtcgttgtcataaaacaggtccatagggaaaccgtccacgcctatacgtacgtcatattcccccttatatgcagcctgcggcggtgtcagccacccgcacctcttccaaacgtcgttcacaatacgcaccgcaccggtattatgtgtaccggaagaatcggaaaagtccgctttcaaacagaatatactgatcggccgtgctcccggtttgaaactgtattcaagggacggcacatccacgccgttaacttccagcgtggtaccgtatttttccaggcgcaagaaataaagacggtaattcttacgcggataagtggtggatgatgtaccctgtattcttagaccgacattccttgctacaaaatcgtactccttaccctgcgggctataaaaatagatatcgaccggtacctcgaatttcttgttattggtggcgttgacaaggttcacatcgccgacaattcgcataaccgcctttccctgggcgcgtaacttgtctatgtcgatatccgtaccgttgtcccccgtaacatcattcttttcaaataacaggaccatttcgtccgacgtagtccggtctaccatgtaattgttcaattcttcatcatccgtaagcgcacggttataaatacggaaattcctgatctccacatccgccgtatcactgaacaaacggatgttcaccggttccgcctgcagtaatccttcggtagccccatactgcaccgctccgcaacggattccgtttacataaagttccagcaaccgcttaccggccttggccccgacaataaaggccattttcaggttcatatcacttgcaaacttcgtacttacttccgtaccgccggaaacacgcataagggcctgctccgttgtcatctggaaaccgatatcgccggccatacagtccagtatcaccccctgccggtccgttaccgacgaacaaagaatttccatttcataggtagccccggtagtggttgcatccgtggagaacggccggtacccgatttcaatcttcgcgcctcccgtaagtttcagggcgtcacccgtccagccgttgctgctccagtcgaaaccagaaaatgtcgtatgtatgtcgccataatcccaggctcccggatcggattcgctgttgctccgcccggctgccgaaagtttcagtacaagcccggcggtagtttcctgcaagtcgatcccgctttccgttacgtcgatataaaacgggtattccgtggcccccgtcttaaatttcatagtgatctcgccctgctccgtaaaacggttggtatatgtctgcgtagtacgggccacactgacagactgcgttttcaccccgtcccggtaaacgtccatttgagccggcgttgcgtcaggatcataagccacaaagtcaaattttacctgttcgtactgccccgcttccaagcgcggaacaagatggtcctccgtaaaaatacggccgtccggaaaactcatcatcgtgccgatgaacggtgccgatcctccggatttcagaatatcaatatagatactttcagactttaacacgagatcggcggaagcctccatttcggcaaccatttgaacggtattccggccggtcacaagcgaagagggggacaaactgaaactgccgtttgtcgttcccgatcttgtaatggtgtgcgcgttctgttgccggccgttcagataaagcgtgacgacctttgttccggaaccgctcacggcataagggatattaatcgtgtcggccagggtataaccgcctgcggctatggccccggccagattgtaagagctggtaagggaaaggctgacaaccttcacggatgtaaacgcctgtcgggtctgtttcttgccggtagtcggatcggttgtggttgccactacgtaaatatcggtattcccaacaagcaagtaacttgaaaggtccagttcgtaactgcctttggaaacatcgctgaccgtctgggaatacatggtagttgttccacgcctgatcgtaacggtgatatccgccttttgcccggtagattcccccttttcatcccccgtggtgtattggtgatcgtatgtataagtaagacgggcgtttccgccttccttgattatggcgttatctacagccgcattcaagacaattttagtagccaccgtttcgccggaacctccaccggaaccggccgggatatccacggcggtaatttccgcgccgcttttgttctggaaagacagacggacggatgtttcatcctcgcttacctccgcatttacgttaaacagcgtggaagcgtccacctcgttaaaacgggcggttactaccttgttttctaccggattggtggaatcggtggacaaagtctcgtccacttccaggatatccacgtttacattcacattaccggccgcgtccggcgtctgcttctcgccgtttaccgttacgctctttaccgttcctttgccgccgaactcttcccagctcgcctcctggtcccaggcatccagggcggttccggtaaactggtacgtctcccatttgccgagcgatgtttcaaaggtgatgacacgcccccggccgcgccacttctccggtaccgcggcaatggcggaagccagggtatagaaaccttccgtaagcggcacactgccggttacattataggtattcccgccgcctgaaccgccgctgccgaaatcctcccacttttcgacattctcaaaatccgtgtccggattgcctttaaattgtttcgtcacccagccgtcggcagtgaggaaagaaaggatcacgccgtttttccggacatcgtcaatcttccccgccgttttcaatgctgcaaacacccccgacagatcactataaacgctgccggcgttcaagaggttgtttacattggtaaaggtggaagacagacgcccggcagtttcctgcaactcctgtttcatttcgtcacggtctgcctgcaacgtgcttatgtcctcggaacaactgctaatatcctgggacagacttttcagctttccccaaagggaaccgtcttcactctgtgaaccgtcttcgctgccgatacgggcgttgatatcggccagcaatgcggccagcgaatcactgtctttaagcccgtccagaaaagcaagaatttcgttaaagttgccgattgcctgcgaagcgttgttgccgacaagccggtcgatacgtagagaaacggcgtcgatagccttctgcaaggctgcatcggcggcaatgcgggcggcttcctccgcctcgatttccttaccctgggaaaccagtttcaggtgttcgttcaagaagccaagaaccgccgccaccatttggttggtaacgctttccgcgtcctccgcggtttcaatgactataataagatcatcgatatactcctgtgttgccatatagatacattaattaaattgtttactgaactctttggaatgaacccgcggtttccggtagccgctttccgtgatttctcccgtccagttggactccttctcggcaaacgtgagctttaacgtcacgttctgcggcgcgtccggacggacacggtaagaaaactcttccgccgaaggaattaccttgatctcttcccggccgtaacctgccaggtagacatcatcggaggaaagcaggtcaagaagaaagcgtatttcctgcgggcgtttgaatcccgtcttaaccgttacggcttcctgtatctccgtacgtatgcgatccgaataataatcatcggtaatttcatcgtaacgccggaaaacagcgtcttcgtcttcatccatgccgggagttacgctcgcctcgccttccagggaaaacacctcgtaaaccccgtaactgttcaggaaccggagccggtaacgctcgcggaccgtcgggctttgctcgatcccgatccggagagcgaacgtttcaccgctatacacgtcaaaaaggttggccagtaccccgtaatcggtaaagaatttaagtcttacggcctccaggttcaaggcgtagaaattccctgccgtgcctggtactgcaaggctttgtccggtaagaagttccgttattttcagctcgtgctccggatagatgaaacagagcgggtaaagttccgtctcgcgcatcgttatacgccagtcattgctccgggtggtaaagaagaaattgcaggattcattcaagaacttcaaagaaaagatgttattaccttcttcatgcaatttcttaaaagcccgtttggatataccgccacgccaggcagtaacaaccaaagtggccgtttcttcctcctcattttgaagggtgatcgtgacgaccgccttgttataccgtttatcggaaaggcttatcaacatctcggaactgtccgttaacgggggaatatcaacaaaaagcgtttccaggacctccgcgatattcaccttgaaacttccattaccgttaccggtaaatatggaacgcataaattcaaagttcacgaaatacattatattgtaagtcgccatagaagtagtttctaccgaaagataaacagggtttccggtaaaggcgttttccgtcggatcaatgtttgctgtcaaactcataattcaaacgtgttaacgatgaatattccgttaaactcactcttattttcaagcccggaaaggaaatggtcacgctgatccgtgggagacgtcaggaacttgtaaaagtccgagagcttccccgaatgattttccctccaaagcttgtaaagctctgctacctgtgtggtacacggagcaagtacgatattattctgcttttccatgctgcaaaagttgggtttatcaaaggaagaataaaggacgggattaaccggaatatacaacggagatgaactcccctatatacgaaagggtaaatgtttcattataagttccggtagttgcttccggatcattctgtatataatttatattcactcttaactggaactggtaatcccgcgtcagcgtatcattttcagaggtgggcggattttctattatataatcatccgtaccgggatttataaaaccgtccgttatggtccaatagcgttcattctcaatagtaaagcctaaacctttcaagtagttcaatacctcctgctttttattttcctgcacttccgcctgagtattacgaaccagtttccagacatataaagtactaccgaaatctttaataaaatgttcctcgtcaagattatagggagctattaaccggagtgttcttaatgtcagatcgacaggtacaatcttatttgccggaagcgaataagaaagtccgtcaaaaagcagatactgtccccgcagggctacaggtgtcaatatatccatgctcataagctggtggaccggtaacagggtatttgcttctacctggttgaaagagtgtcttattatggcatcgtattttttccagaagtttataaacaggccgttcttatattgaaataaaagcgatatcgtatgtttacttccgtctttgaggatgacctcctcaccctcggaagtataaggcaacacagaaccgaaaggatatttactattctgtgaggatgtaaacgcaaacacgaaagataacggtgtttccactttctccgaatcttcatcatcattattggaggatgttttaagatatgtgtaacggtgtacgtaatcggccagatattgaggggaaagaatatcattcggggcaaaatccattggaacgcattcatcatcgctggttaattcgttatcttcaatactgtcgcttttccggtcccaggaaaagaaactcgatgaagaataagtaagacgcttgttgtcttcatcccatttgaaccagcgtcccgtcgtttcctcgtaattaaggtgtatcaccctttgggaaacgtcaactctcgccaggcgggccacttcctgatcctttaagtagtcttcaaaccgttcaacagagggggccgcaccggtaaaggaagttttggccgacaacttcatttgccgggccgtttcataagttattaaaggttcgtctgtcaggctgcgggataaatcaatgtccggaacatcatccacaatatcacggatcagtcttaaagtggccgttttcgtatcggaagaaacattataaaccagtccgaaacgcacataaagggcgtttaaaaagtcctctaccgtacaatccggcattaaatcggcgtaagaaagctttcctttaacacaacagtcggccgcattattcaggattaccaggttataaagttgtttatccgtcttaaaaggattttcggttatggtatatccaaattccgaaaaaacaagttccagtacacgccatacatataaaaaggccgttacgccgtagccttccggaagtgttactgcagtcggagttccatttactaagaaagtttccgttcttgcctgataacgcaacttatagactttacttccctctgatacaggcgtgatataattcaggtatttggggtaagactggttatcttttgaatcgttaccggtcataatctggaagacggcataatcagtctgataaccttctaatacttgttgcaaatgcgcacaaagggaatttacgctgctatattccttcaccggtaatgtaatggcatttaatttctttgctttccaggcgctgtaggcctccgaattgtcaaagccgatgttaagggtaataccttcttttttaccggcggaaacgatatttatctttccggtacgtttatatactccgtccagtaccgtacatgcctgatcttcattcatcggctttacgcccatgtcgagacggtgggcaaaaccggttattttagcattgttaccggtacatggaaccgtgaccggtacggtctgcgatccccggtcgttcatgacgggggatttctcgtcgatctgtacggtaaagtcaccccctaaatccagataacctttgttcgtcttaatctttagcataatgattacttattttccgcgtgtaaaggtgtcgcgggcgttatctatggtttctttggccttctccaaatcctggtaaacgatataggcctttatcaatttgatagcctcacaggaggcgcgaagctcctttgctgcttccaggaactcccggtaggaagaatcacctgcaggggaagtgacgtaaccgccttcataatattcacccggattctgtggtaacgggttggcattggtacgctgccgcctgatcgcttcgatagtactaacggcgtcgatcactttaggattattcatttccggttgtggtaccacatattcccccttatgaactacgccggccacttcataacggccaccgggaccggtgtaaccgccttcataatacccgcttccggaagaaccggaaacaacacgttcagccgtggcggtcttgctgccggtggtattacttacagacatgtttttaatcttgtcccgttcagctttggccgctgcaagctgggcggcaccggtagccgcaagcattgccgcagcaatggctccggcaatcggtccgagatcggcggtcgccttcataatcgaaacggctgtatcggctatgatctgggaacacttgatagcaaagtttacatccgcatacttcttttgaatttccagtttcttattttccttctcttcttccagggcggcggtatcttccccgttgttttcggcttcctgtatgagaacatcgtattttgcttccacctggtcgatttcggcctgctgcatggcttccaccacggaagaagcaagaccggaataaaagtcaaagtattttttagcatgttgtattcccagttccagcctttttttctgatatgtcttttcgtcaatcagcccctggtcgtgcatattttccaacattgccagttcgtggtcgtactcctggctccaggatgtcccgatttccgcctgtatctggtaaagatcattctggtactggaaatccagctgttttatcgcctgttgtttcgccttctccagctccacagtagaaaggccggcggcctttgctatggcaatggcggcgtcgtatttggcttttactgcctttacctccttatcgtaccgttctttcatcccttcggtcccggatttgtcggatgtcagcaactccaccatttgcgcgatagccacccggtcacgcaataacttcatttcagactcacgcacggcgtcggccgcttccgtcgctgtttctatacgtttctgtttgccagtaatttccaaagtggcaatatcattctggtaagtacggtttatctccagaagttctgcggcgtgctccgcttcaacttccagcatataggcgtcggcggcttcctgcgtgatactccggtttaataccgctttttccatggtgtccttctggacgttgtaataggcggtttcgatctttaaccgttcgccccgtttctcctgtaccagttttatacgggcgtcctcctgcttgccggtttccgtaaaaatggccgtctgtgcttccgtttcgagcctgtggatttcatcgagtaatttctttttattagccggtgtttttgcctccagcttttggagggcatcgagacgttcccggtaatagcgaaggttttccgccgtcccttcgagaatatactgggcttccgtcttattttccttctcccggttctctttgattagaagcatacgtttttcgtgctcgatctccagaggttttaatgtggcggccgtttccgtatttttatactccccggcttccactttctttttgactttccccagctcgtttaaatgttttatctgctcatcaatacgttctatctccctgtttttcttggcaagattttctttagtatcctccttccatgtttcctgaacctctttcctttttttctccagcttctttataagggaggtttcttcctctactgcattaccggtcgccttagtgccttccgtcgtgatcttaactgattcccgctgccattcctccagtttcttaatatatggttccagtcttttatttacctttgccaaatcttcctcaacttccgctttgtcaatggtaagccgtgaaaccttcgttatttttgccgtactcaaccggggatttttatttattcttttattcagatcggcgatttcttcctccagctcgtccctttcgaactccagcttagctttttcatcatacaaaggctgcataagagattttagcgagttcatcttcatttcgttttctctcgcctttaaatatcgcttaatggcctccgtgttttcatcatataacccgccttcgtccttgattgaagcgtggtactccggaacgatctcctgcaacttctttatatattcccgtctctcatccacacttaaattcgtgtcatgtatcgcttttgtgagactttttatctggtccttttcctgttgtaaggttgcggaaacttccgattctattttattaaaattagcctgtgcgtcccttgcttctttcagttttttagtaaactggtaaatagccatgccggcagagagtatcaaggcggtaacggctgcataaggattcttcaaaagttcgatcctcattaaccggagggcggcggtacatctggtagtattcttgtgtaatagtgcctgggctgccgcataagtcagagtagccgcccggctgatataaagctgtacggcgtgcgctttctctgcaacgaccgaagcaagggtcgccgttttaaaacgggcgtgccacatggtagtgattttcagtcctccatagtaagaaaccagataagcggtaacggtataagtgacaacaccccatttattaaacatgtcaatcataccccctacaccttccaccataagcgtaacaaggtctattaaatcccggagaataccctttgattcatagaaacgtaaaactaccccttcgatagttgaacttagccggtttaatgcaccttgaacgttatcacccatttcttcggacatggcgttaaatccctcttcggctccggttactgcatcacggagatttaaaacggtatcagtaccatttaaaaaggtattaaatgcggcaaccgaacgtttatccgttaaatccagggccttattaaggtctattccttcactgtttaattttttaagtccttttaccaggtcttccagattatccaccggaccaccgagagcaagtgcgagtttgccgctactgtcagccaggttaagcaaaatattacgtgttgccgtcgctgccgatgaagcgtcaaaaccgctgtttgccaaagcacccaaaagggcggtagtttcttcaatcgtgaacccgaaagaatttgcaaccggcccaacaatagacattgccgtatttaagtactcgaagcttaaagcggatgcgttacatcccatagtcatagtagaaacagcccgttccgtatcttccgcatcaaggttgaaaatacgcaatgttgcaccggcaagcgtagcagccgaggcaagatcagtgtccacagccttagcgaatttcagcacggaaggcgtcatcgctttaatatcctctttaaaaaatcccagcttggcaagctctatctgaagttccgttacctgtgcggccgtataagaagtagtagcacccagccggcgcgcttcatctgttaaatccttgatactctttttcgtggttcccagaatagcggccaaagtactgtttttcttctcgaactctataatagtactgatcgcatcccttagcccgccgacaatctgtccggttatcattgcgccgatagtgacaaacacaccggccagaaccgtttttatcttattcagggaaagaagggaaccgccgaaaccttccgcctttttcgtggcctgcccgtatgctttctcaacttctttcagttccttctccagggcggcatatttttccggctgcaaggatttcaccgtatcgcgaagctctttccgcaaggcgtttgccttccttgccagctggttggcactcatggtggttttatccagccgtttctcacattcggcaatcttcttgttattctcgccgatcgtcttattattttctttcagttgctcatcaagccttttccattgtttaccgccagctttcccggtggcgattaaatcggtcatagccttttttatctccttattgctatcccggagctccttgttcttttctgaaagattatgtatttccttctgcgcatcggaggcgttcagggttaacacccattcgatatagtcaggttttaattttgccataagagtaaattttataaggcaaaattatcctggtgtaaagtggcggaaaaggacacaaaaaaagcccgtagaaccattctacaggcttattatactaagaagaaagtattttatctcttaaaggtaaaatccgaaggatcaaaacattctttatccttaattgttgcccgatctatcatccagcaaatgtaccaggttagaggaaccgatataagaggcgtcacgataaaggaaagaaaggcaaaagcaagccacccggataaagtagccggtttatgcttacatcctacgaaaaaaaatattaccaggaaaaagccgatcaaaaataaaatatcttcgtatgtcatacaatcatcgttagttctttaccgatatctttaatagtatttactattagggcctcccgttcttgtgagggcttttttattccacttatatattgagacataaggctttgacttattcccatacgtcgagccaccgcagaagcatttagttccgggtgagaaataaaaatccgatataagaaagtttcttccttcttatcttgaatagctaaacaatcattcatagggtctaaaaatatgcagctataccaatttcatataaaaactccggtgcaaggtcggcaccattggcccattcaatagtagcacgggttaaaccatattgaacaaatttttccttatccaataactccccgaaaacctcacctgtaagataaggttccaaatttacgatctttttactcccgtcgctgaaagtaacaagaagctcgtaattcctaatataatccacatctataacccgtaacataagcgtttattttaatggttcaattttatctattttttcccctttttgggccttttcccaaagagaaagtatttctgcctcgtgcaagttaatccactcatttacttttgcaataactttagctggagcctgaccgtctacaatccgatccaatacgctaatagaacattcataatcaccataagtaaaatgaatatgtggcggattatgatctttccaatagaggaatataataataccgaagaatctacaaatttcaggcataaactttgttttattggttactgaaacaaagataggtaataaaatcattacctacaaatatttaggtattaattttattacctattttagcgaactggcaaacatttcttttatcctttcccttacataatcctgatattcatatttaatcttcccgagtgtgtcatgatacagaatcccgtatatctgtcggttataaatctggtaattaccgtgtttcttcatatccaggaagcgggtatataatggaaggttagaatgtgcaattaccccctcgccgtccggaacgaccgaataattcgggttctgtagtgcggccattaatgcaccggatcgcccttggatgatctccccggttccctgtactttcttacgttcacggcctttctggtaaatccgtttggtagcgatatccaattgggcttgaaatatgtcctgtattccacgcccgatccggtcggtaaagaaatccgttttaaaattctcggccattcagttattcattttttgagaatccggaaataatgtgcctttccccggattcatccttaacagtttcatttttcttgtttgaggtatatttatatttccaataggtacatagcacatcatttacacctattgtaataatacctattatgacagttaaccagaaccacgcaaaagcatccattagaatcttgttttaaatgagaaagccaggctccaccctgcaaacgtcctgtaaaagccggattccggaagagtggaaaggctggttaaatccagttccttagtgacagggcaaccggtggcggaatcttctatcagcatttgtttgatacgctccataaccggctgcacctcttcgatagtctcataagcccctttacgttggggatcgtacttgctcataaggaaaataacgcataaattattttccctcacattgtcagccgaaaggctggcacccgctcccgacgggatcagaataaagagcaccggacattcttcttttgatagcccctgtatcgtcttactcatttcctcgtcaatggtaacgggtagcaccttctttatttcaggaatacgtttttgcacgccttcccagtattcacggtaaacctttatatctatcatatcgtcaatccctgataacgtttcgcctcccattcacggcgggtaacaagccccggaagaatcttaccgcccccgtatatccactttttaaactctgccggtatggatgaatcatacgcatccgctctgatcttcttataaagcgttgatttcttgaattttccgatacctacattaaagcaaaagcttactaccgcgtcaaactggtactgtcccaaatgaaggggaagcgcgtttacctggttttctaccgccctgatatccgattcaaagaaagcatcggcctgggcctcggtgataacatcacccggttttacgccgatcgtgtgaccgtaaccgatcgtacatactcccgcggcacatacatacgctttcaggcgtaacccctcgaatttcttgatcttgttttttgttcctgttgtcgttctcatttcttgttacgtttttggtgtaaatactcaaacttacatttatacagataaagcaatacatcccaaaagggtgtatcgtccacctccttcttatttccgaacacgccggaagccgccacctcaaagactatcccggtccagccggttttatcgtccgccttccggtcctcggatgccagcttctggaacaatatccgaaagtcgatagcttcaccaccgatataaaccggtccggaaagaaccatttcccaaacggcggaaaagaagtttaccgcatgaatggcaagcaaggaaggaacggccggcgtcttctccgggtccttgtaccggtaaagctttaacgtgatatcctggaagatttcatttatagccggatcgtctttttctgctgccgcctgtttgctttgctgcaacaaatccaggcaatcacaaaagttaccgaaagtaagaccgttcagcatgtcaccgacaccatgccagcccccgaaatcctgcatcaggttacgaccggttttcagaataggcgtaacgatccgctcgccctccttaccggttgtataagagaaaaagccgtccagcttttccagttgaccgtccagctctcggatgatctcacgccggtacatggtgtaatccgctttcatgcccagaaggaaagaaagccattttacgcggaactgtccggggctgatcgtaccgcggttcatcagtaccgacaatataagaaactgccggtactgctcactactgacttcatccaggcaggaagggacctccaccgtcttattattatatgtaaacttctccatgtccggacattaaaaggttattcctttggattgtacggtaacacccggtatatagtaatccaccgtttccgactgtgcgtccagctcacggatgatatcctgcaatacatccaggtaagccgccgcgtcctgctccaggctgttagcaaccgactgccgggcctctttttccgcccgcagtttatcccgtacggttgtgctctgctgcacctgtacgattccactgggcagaacttccaccggtaaacgttcaacggccttttttatggtaagaagtgcaagcgggcggcgtacatattccagcaatttctccgttaaaacggtatcgccttcaatcagtttattataacggttccgggtgataacaggtattatctgcccgtcctgaacttcccggatcataggaataagcaccaggaaaagccggtgacttccgatattgtaatattcatcgaacgtttccttattctgaataagaagccggtttatagcctttttcttaatgccgttcatccagaaatcaaatttttcgcggtccattagctccaccaacgcgtctacggcttcataagccaggttccggatattctcttcatccttgaactcctgtaaggcggtcatgcccgtttcattctctcccaaatgtttaccacgtccggccgttccgtgttgtgcgtccaaagtgggaatgacctttaaccaggtaaacatcgctaccgcctgctgcatcagccgcaaagtttccgccatgccgtccggttccgtaacgtccgcatgatcttcacggtaatacttatctaccgcgtctatgggctccgttccgatgatagcctgtaaatcccgaatacccagcggtaagataggttcccacttggtaaaatcaagatcattatcgatcaatcccaggacacggactatttcaccggccccgtcaccgcctttattaaataacttcgtcatttgctcggtctctttttaatgtatatggtttccaattatcaaaatcctttgtgaaattgtttatttcatcgtagaactccttataaaagcgggccagcccggtatctatcgttatacaggtttgctccgtgcgcggattggtgtttatattggccgagctttctattacaaaatcaaaagcgttaccaaaaccggccattactttagcatggttacggaaaatacagacacgtgatccgaaacgttccgccaccttctttaggtataaataaacatccgcgtaggaaccttgaaagatttcacctacataaaaatccgcgcgccctatgtcttttctctccagccatttctccacctccttgacatcggtaattgccatgcaccaggtagaaatcagaacatattccaacggttgttgcttcacgatcacacgaagataagtaaggctgtcaacgtccccatgactgatacagtgataagacgcccctttctcaaaatgccagggcaaacactcttccaggtgcagctccgattttactcgccggtcaaaatggacgtttttcgtccggcgtgcctttatatgcttgtccgggctatcattggcccggttctcttccggttgccggtcgcttaccggttcttccggcacatcttccggtttcggtgtgaaaaacagactacgcattttctttcatacggttagagggtgaaacgttctgttccgcttccactatggtacgataaagccctactttcgttgcggtacccggaaagttggcattaatatactgctgtaacggtttacaaaggatcatgtccggaatagccgtttcggaagcgttatacactttcaggctgtataatttttccgatccggaagaaagcttgttttctataatcaggtttgaaagtaccggatcaagaccgaagccggaagtggcggcagcgtccgccttattggatatcttaatctgggcgtccacataatcctttatcttcttatccagcggttccaccgtccagccctcaaagttattcgcttccggattccagaatttggtcgtgtgcatgtatttcccggcgttctgccttccggtaatattggaggcgaatttctccatagcttcgtccttgaaatcttccagcatctgggccgtgtatttctcgcccgtacgctcgcaaacctgttttatacgtgcttccgcgcggtcccagtaagactgcggcgattcgatatgcagggaaatggccgaagcgttttcattataggcgatcaggatagcggccagaccgccggcaagctccagccagtcaagcgcacccagaaaacgcggcgtactcatgaagtccttgcaaaaggaatagatattatagtatttcacggaaaccggatatttgaacgggtgggccggatcaaagaccgggtaacggtaagtataagccggatcaggataaggaaagtcgcccacaagtacttcctgcggttcatcctcgccgtcgggaggatataccaggcgggccttctgatagggaatatgttccagccgtaccaaacgcccgggattgcccacacgcggcgcacggttccggacaaactttataaaaaagccctgcatgtgtgttaagtctacgagtgagcggtgaagaaccgttgtgtaatcccacgactccaggtcggcggttatttccggatcgagtttccaacgccggtaaaaacggttattgtcttcgtcgattgcatcctcatacagccgcgggccttctccccactgcaaaccggctattttacccataatgccttcaccggcgtagaatttatccagtaaacgcatgacctcgcccggcatgtcgttattgtcacccatgggaacgataaaggtaccgtttacgctgatcttccgcgaaaagaaagccccccgccggtttaactggatgctggaaggttcccaacctttaccgcggccaccgatagaaaaggagatcaaacccttgtcggtgccggtatctataattccaaagttgccacttcgtcttatttccataatcttaaatcgttattcttttcccgttgaactccattaccagacattcccagcaattcagcggccggcctgttgtggtgtccgtcaggaatagtttatagcttgaattttcgatgctttcatccgtcgcctttttcctcaaacgggcagccgtgagtatcaccatgtcgccgccgtcccgtgtctgccggttccatttccggaacttgatagaaaaggttcccccggaaatggtaatccgcttcatctgttctaccgctacataaaggtttattttttccatagccggcggataaaacttttaatcctgccccagttatcatggaccaggcaaaaggatagaaagaaaaacatgaattttaggaacgtccataagctacacccgtttgtaaccttttctttttcctggctttgttgcttaacgtcggatttacgggtaacgactgtttccgcttgactggtagtttccttatgatcctggaaggaactgctttgattctttccagttcttttttcagtttttcggttgctgaaatcaatttctttaattcttccgaggctgtcgtagttgatacggatatgcgtactatcttcccggtaaacgtcaagtacgtgctcctcatggctcgaatctctccgcgcaagttcaataactccgtcagtagttgtttgtttttcttctccagttgcttctgtaaccgtttttcgtgtaacagagcgaggagaacgacaaccgtaaaaacaagctgcaaaacaaataaaaataagtaggtgtacgattccatgtctcatgtttattaagtcgttaattattattagtatcaaaagtgatagatttacggttcgggcaattcttcacgccgcaaagaaacggcttcatagtgtccattacacgggcgttctgcttgatagccttttccatttcgttacatttctgcaggacttccttgtacttgttatccacttcgtcaaaccgttttttctgttcctggtatgcgttctttagctccttacggtcattcttcatatcttctattagttcctggtaaacctcttgtactgacttcatggcatcagcttccgcttgtttacgggtatatcggagagtgaataaccaggtcaggccacccgtgcaaagagccgtaataatcgctgtaattatcgtttccgtcatattgatagagttgaaaattctacattatggtccggacgatacatacatgcgtcaaataacccgccacaatcccggccaggtccgccagaatatccttccagtcccatttattaccgggtgacattttatccccgtattccttacccaatgaagcacccagggcgaagggaacaccataattacccaacagggcacatatagcgtaattaattccgaaatgcttccatttgtcagttcctattttcataatttgaatcattggttatactgcaaaggtgggaagaacggaaaccgacgaaaaggacataaaaaagagtgccgggaaccaccccggcacaaacaaaccctaacctgggacttaaacccaacggctgccttttcagccggtatgctaaattgttaatattaaggattagacaacttttcgatgtcttttttcatcatacgtaataattgaatcctccttaacacctcatttgttggtgtactttcatctcctttctctattaggaaatcgattaggtcctcaataacttcgatgtaacaagcggaaaccggttccgtcttagtttgccactgtgtcaaaatctcggcactttcatctgttatatgtgcgccgtttacttctatatctttcataataattctttctttaaatgtttttaatcggtgtagtctctaaggtagtgaaatcaattattccggcctgccggtatatcccgagggcgactttcctaaaccgttcgtaattacgtctatcaatgggcgataactgccacctcttcatgtctttcatcaaatccggtatattattagcactattatacatacagttgtttttaccgtactcgtgatgaagtgatacagactgaaaatcaccggaaaaaacaaccaaccgtaaacgttcaagttcgaggaaagcaaactcattgttaaccttctccaccttgtatgctcttagttcaatggaaggcgcaccgtattcacgtctaacgaaaaataggatatcagaattatttgtattcatttggcacctccttttaagtcttctaatttaatatgtgaaatacttgttatactttccagtaccccgtcgcatatacttttaacccttaatccgcgggaaccgtcttttttgggtaaattcaggtgataatacgggcgattcctccagaatgtaatccggaaaatccagccacgaactttaaaagtagcattacttattttataatcaacctgtaccagatcacccggtttaaatttactttcttgtagaaacatcccctgtatttcttcctgttccttctttatttcctcaattcttttatcattgttttgtaattgggtaagtaacacttgctgatattcagtatatatcattcggcacctcctttcttttctatctggggacgctctgaaaacctatatattcttttaacccggtaaataaaaaaataggctacaggcttgtcacagccgttattatgtgttttagtgtcctgatctatgtgaataaatccgatgccggaagatattttcaacggcattgttttagggtatttctcgttcagctcctttacctttgcttccagttcagttttaaaagcatcaaaggaaattttatcagggcaaagcgtattaccaaactggtttgcaaactctgccatttcagcacattttcgattctgtggcttatactcgttaagctctataaaataggatgtcattttcggcctcctttctgtaccttctttgcccggtacacacaaacaactgcaccgataacagccggcggaaagataaaggttagacagaaccaggcaatagcagataaataataagcatcggaagccgagtttacggaacaatctttttccaattcctgaaaataacgatgttggatcgtgtttacgtccgtgctaccagtacggaacgaaggcacgtagcttgtgccggattgaaattcttttttcataatgatagtgattttgactattaaaaaagagaaaggcggctaccatttcccctaattcgtcaaaatcactaccgcaaaccgtccgatgaacgggttaaaagtaatagggaaaggcaaccgccttatatatctaaaatagataaataccgagcataaaaaaagcccgttgtttattcgagccaataaccgagactcaccggaccgcaccagcggtagcaattttgacaggggcaaatgtcggtattaaaatctgaacaaaaaaaaaaaaacgttaataaaagtttataagaaaaagaaaatttgtcgactctataattcgttacttcgtaacaaaaacgcccgccagaattggcgagcgttaatctattcttatggttcatatctcttttgagtttcaccctcttcatcactttcctttttcatatttcgcataaataaaggaactttcttttcaacctcttcatttttattctctttatcttccatggccgctttctccatgtcttcaaaatctttttgtgttataattccttctcgtatttcatcatcagaaactatatctttacttaataaccaatgatatacattttgattcgtgctctcatttgtaacaacatacgcctgctcaaatttccaccgaaattttgctaaataattcatggcgtctaccatagaattaaattcaattttcttcccggattcatctaccataaacgttttgtattttccgaaataagatgttttttgcccgaagtctatttgtattttgactttagaacttaagactttccctgtaccaacaatttcacaaaacgtttttcgagtttcttgtgctgtagctgctactactaaaatagccaacacggtaattaataataatttcttcatatcagtaacttaaaattagtgtaccttaattccgcaacactattacaaatataactttttaagtacctgagcaacaaaaagttgctcaggaatttgccatgtcagatttttcacctatcttagtgttgcaaatcaaaatatgtatcaaacccgacagacatggcaaaggtagcaattaaatccgagaaactcactccttttggaggaatattttcaataatggagcaatttgactccagactctcatctgtaatcgactcaaccctcggtatgagatgcaggctgtatggttatcaatacagcgaaatcatccgttcgcttatgagcgtttatttttgtggcggctcatgcatcgaggatgtcaccactcatctgatgtaccacctttcgcttcatccgacacttcgcacatgcagtgccgacacgattcttagagccataaaggaactgacccaggataacatttcctacacatccgacactggcaagacctacgacttcaacacggcagacaagctgaatacactgctcctcaattgcctattgtccacagggcagctgaaagagggcgaggggtatgacgttgacttcgaccaccagttcatagaggctgagaagtttgatgcgaagcctacatacaagaagttccttggttatcgccctggcgtggcggttattggcaacttgattgtcggcattgagaacagcgacggcaacacaaatgtccgtttccaccagaaggacacgctgaagaggttctttgaaaggtttgaacaaaacaagcttattatcaaccgtttcagagctgattgcggctcgtgttctgaagagatagtggaagagattgctaaacactgcaagaccttctatatccgtgctaaccgatgcagttcgctctacaatgacatctttgccctcagaggttggaagaaagtggaattgggcggcattgagtttgagctggcctccattctcatcgagaaatggaaagggaaggcataccgtcttgtgattcaaagacagaagcggatagacggcgaactcgacctgtgggaaggagaatacacctaccgctgcatccttacaaatgactacgagtcttccgagaaagagattgtcgaattctataacctccgtggagggaaggaacgcatcttcgatgatatgaataacggattcggctggaacaggcttccaaaatcctttatgggagaaaacacggtgtttcttctgcttatggcactcatacgcaacttctataaattcatcatggcgaggcttgacgtgaagaggttcggactcaaagcaacaagccgcatcaagacgtttgtctttaagttcatctctgtgccagccaaatgggtcaggacatcaaggaagtatgtgctgaatatctattcatgcaacaatgcttatgccaatgtgttccagaatgactttggataacaccgacaacttatagtcgtgattttgcgtattgcctcaagtcgcatggtggggtaaggggcatttatatgtctttatggtgacattcgatgcactgtgccccctttttactaacgatgcagattcttttcgcttctgtatcatattaggcgcgtagttgcggatttgagggtgtatactttcgtctgtaccacccgtaagttctgacggttatatgcagtgtaattttgacggctgcaaaaatacttaatatgtacaattataaagaatattatccccaaaaatgaaaggcaaccgcccaaaaatacacggtaattcatgaaaaacgccccaaaaaatgaagcaaaaacgcataaaaaacacgctttttcgcgtaaaattttggtctaaatgcagataaacgactgaaaaacaatcaaaaaccggagaaaatttcaaaaactaaaaaaatagcaccttccgaagaccgagccgctcagaagtcggaaagcagttgccctccccctaaaaggtgaaatatgacctctcccggaggggtacccgtaacctggtaacacaaaaaacgccggaaaaccaattttccagcgttacaaggcaattaccttttatgcctgttctctatccattgatccacaaacgagtcggcctgcagcgtccgcttgcctcgtactaaagctatccagccggggcgcatcagtaagtatttgaaagcgtcggagaaattggtggataacatcggtagtttttttggtgccagcttttcggacttcttcactttgaacactactttagaattaccccggtatttgatttcagcctttgccttttctacagaactaaccatttctttacagttcaccgcatcaaccaacaggataggcaggttcttgttggtaccgcccataatctcctgcatgaagtcgtattccgcatcctgccggataactgcctgtttgcggctctttaggtttacgatccagccggtacggtttccgctgccgtctttttctatggcgtctttgatcttacccgcgtaatcctccttctgtttttcaaagttattacctgcacggtcatagtacaaatccagttctttgtattcgtggttctggaaaaaagaaaggaactggtcggcgatctcccggaaccagcccggcggtatctcaaaaaagttcttatgtacccggtaataagcaccgtccggctgaccgatcaccaaagaaagcatattaccgaagtccataccgccttcaatcgctttatcatggtgcaggtaccggagttcccgcgagctgtaagcggcttctccagacatggtaccgttataatacttatgtccttcaccaaacaacacatagaaacgtaaatccctgcgaagaccgggacgcatacccaccaccgactttttaaattcgtgaagctccagcgtaccattatacaaccgctttaaatactctatcgtaagtatctcaacattagcgaatgaagaagcgttaagaaagaacgtctgcccttttctcaacttcaacaaagcccgatcgtaatattcaatatcccgcttcaaacgtttcagtttcaagggggaaggcctgttctttctttgttcccgtaaaagggaaattatcaagtcattacgtacacttgccgcctgcactattttaatgatccgttccgggtccatttgcttgacataccggaaaaaccagtcgtactcgttttcgtcgatatccggcatatcggtagtaatggttattcccaggaacaaatgggaatgtccgtaagtgatcgcatcaccgcgaagaataggcatagcgcggtttactttcatttccttatcgtacttcgcttcatcataaaacagatgtattacagactttccggcaagcaatgaagggttatccagtgatcccatgaaaataacacatccgttccagaagctataaacatgcttgtaatcatctacgataaccgaacatttacgccgccaggattcaggcgggcgggtatcttttacatagtgtaccccttcgatcaggcccataagttgccagcccttctgtacggccggcattatattatcttccaggttactgtaggtattggcaacaaaagcgaacgcaccgccgggcatttcttccacacaccgggcggaacgcctggcttgtataacggtagatttagccataccgcggccgtcaatagatacaaggatagtagtatcgatccagtccgtcagaacctggattatatgaccgtattttatttctacatcatcggcgttactcaccttcgttatcttccccgaactctttgatatcatacaacatacgttttttcagatcaaaagctttaatacgcgcatcctcttttatattatcacgtacaataacaggaatttccggtatcgcgtcgataaactcttccaattccttacggtcgatttcaggaacacccagatccttacggctggtagtataaataaccgtgcttttctgtgaaagcagttcctccggtatttcggtctgttggtccttataacatccgcgaagttccgccgccagtttcagaaggttcttagcctcctttacattacccataagaaagacggtattcgcccaattttcggccttttccgcatacaggttggcgaaagcctgcggacgtacgttatcctgtgtataaaagaaattgagactgtcggcgtacacctggcgggccatccagtccgaaaggccgtaaggctccgactttaaaaggcggatgataccggcctttgtcaccaacttgccatttatacgcatacgggcacgaaggccccgtaccatttccataaggctgtaatattccctttcatcgggcgcgagtgcttccagcgtaccggtagaaagaatcctttgaatctggttgatatccaccttgtcaaagtctattcgtgagggcttaattaaattcgtcgtcatccatttgttcgattaaacgttcaaaagtatgtcttttccgtacggcctccagctgttttatagcttccacgtttccaccttccgccgcttcatggagttttatttcaggggcggcacgtgctacgagaatcccttcccggatcagaaagttaacagaagttcccaccgtttccgcatcccggacaaaaagcccgacatcttccggagaaagccccagggaaacggctatgtctttcgaagaataccctaaagaagacaaacgccgtacatcctctttttgctgcgcatccaggtaaatactatctaccaccgttaaatcgttcatacgcatcttttattcgtttctgtgccgtgaaataataaatttcgtcctgttccattaaaacaaagttccggccgctttcaatggatgccacggccgtagtaccggaaccgccgaaagtgtccaggatcaaatcgcccggctttgtactgtcttcaatcagtttacggatcaacgccaccggtttttgcgtgggatgaaccttttcaccttctaccagtttagcaccggacgcaaaagaacggatattatctattatgtttgtggcaccaatagaaacaccctttccacaatgaaacaaaataagttcatgtataaaggcgtaatgattacccggccccgactgtttattccaaacgagcatgtttgacgcgcctaaatacaagtcaaacaacggataataaaaagcatatccgcgccagtccgtaaaaaaatacacgcaagcaccgggtttcttcacccggttaaactcctgaaacaaatcccggtaaaagggtttacagatagacaaatctttaaaactgcctttctgcccgttatgtgtcattcccaggaaataaggcggatcggttattatacaatctacagaattgtccggaacacgtttcaacgcctccaggcaatcctcgttataaatttggtttgttatcattggaaagttgtttaagccggctttcttctttttctatccggagggttaatgtcttgagctggtgccccagctccgagcggtcgcaagggtgagaaaaacggccccggtccttcatgatccgttgccgttttcctgtcaaagtggcaataagttcaactactttttttttcgcgcctcgatttcttcctctatggctttctttgtagtctcccacttttggatcattgcaagggcactcgctttcttcttctcatcatccccggcctgttccagtttcgccttattctttgaaaggttggcacgagcgttattcaatgccttttgtatgtcgatatccgaaagattctcgacacccttacggacggacaaactttttaccttctcacatttacccaaaatctttccgttttcccggtaatattccagttcgtcccacatttcgcggttagtaatgaaattttccacaaccgcctgcgcttcctgtgctgtagaaagtgaactgacatcatccggcgtaacctccagacgggcgaaagcctccttatacttcccgtatgcggtgaacatgtcggaaacaagtattttcagaatgtcgggacaatccggagagttcaggaaggtaaatttctcgcggaaacgtatcattttggttacggtttccggagccgccttgtatcgtttctccgcctcttccagttcctcttccagctcttccacacggtcggcattttcatccatggaaagaaccttatcccggaaatcggacgaaacgagttcttccacgctgacgccgaaagattcggcaagttccagcagcaaatcatcgctgtattttaccggcatttttggaggttcctgtcgggcgggttccatttttaccgcggccggctgtttagagttgcgccggatcgtcttaaattcacgttcggaaagcccggccagcttccgtagttcctctaaaagaatggccttcatcgtttccgtttctccctgccggcgaaatgacttctttagcatacggttgataccgtatttctcgtacagttccacgccttgaataaagttacgcggaccggccagataggtaataatttcctgtttcatactatataaaatttgatgatacaaagaaaaaaaaggcaattacccccaaaaaggacaaagggtggccgggcatgtgctgccggtcaccctttgaatgatatgaaagccgtttacttacgcctcataacggctttgttcaatccatttcatagcctccgaaccgtcgttaaacgcccgcaatgtcagttgggaaccttcggaagcggtaaacgtcttaccgcctttcagaaggaaattaccgcctttttccactgttggcgcaacgcccgaacatcccataagggtaattaccgatccatgacttccaccggtaacaccggctattttggccgcacctgcggaaagctggtactgcccgtctgtctggtaatctatatctgtggcaccggcttccactacggccaccggttcttccagggtgtcggtaccccggtaaatggcgatatcatcccccttgctgatctgggtgaaagtaagttcgttcgtattcgattcattggaaccggtataagaaacggataacttagacgggttacagggcgttccgatcagatcggcaggctttccgctacaataacggagaacaacgatacattttttagacagccagtttgtcttaaactcgcgaatctcctgttcgttaccgggatgattgaacttaacggaaggcgtataaccttcggcgtcggtttccccgtcactgttggaactgatttcagcggtaccgggtgtcaggtaaataccgatcgcataacgccccgccttcatcacgatatcctcctcgataaccacgccggcctcgtttcttggcggaaaataaagaatatcgtcaacgtcgtaaattacgagctgatccttgggctgaataccattaccgggattgccggccggccttcttacgcttgcttttacgtatgtcataacttaatgatttataaggttataaaatggaagggataaagtaccccttccgattaatttagcctcttgccacttcgtagaatttaccgtcagcagctttcgccaatttgatgaacttgccttcggaaagcgttatagcttcggttaaaacaaagtttccaccgctggcaatggtagaagcattttcagaaccgtttccgtaaatcgtgtaaacgattccggcttctgcatcggtaaagttagtgattgccgttgcttttgtatttacaccggtaacgaatacttcaccgtcaagcaaggaaggtgtcgtttcatccggcgcaaactgcaacgcatcggaagaagcgttttcgcgaccaatctcgataaatttaccgtcggcacgtttcatcagtttgataacgtcccccttaccgggctgccaggcatcggaaataagttcaaaatttccgcttttctcgatcttaacacccttatccacgcttccgcatttcagggaaataaccgcacctaccggagcgtcttcaatatcggtaatcgtaaattcggccgtattggctacggtaacaatggatgtatgaagtttggccgacgggttcttgtccttgtcagcatccacgaagtaagacgccgggcggtcatactcattacagaagatcatctggcgcgtatagtccatatcttctttcttggtgtacttgaatcccacggcaatagcccagatactttcacgccagttactccagactttcaggctccagtcttcctgctccaggttgaaagccgtcatttcacccggcttatcctcgtaggttttaatgttaccttcaaacgtccagaagatacggtggtggttgtcagcattgggaaccggaataatcttcaccgccggatattccttcacatacatgatgttagccttgtaatcctggttctgcccgtaatgcaattcattgtatttatgatacaatacaataaagtgcgaaggcatataaagtgccaggttaccgctgtcacgaagaaccgccgggatcatgcaagtacccttgtacactttttcaccgatgtttgcttcggtaatttcccccaattcgaacggcttgatctggtaaacgagttttccgttattgatatcggtatgtccgttcactttcttgttcaggaactcatacagtccgtcagctgcagcaagtgctttgccgggttcgttcagattcgggtccttacggattccgttaatacggcgttgttcacgctcgttatgcaactttttggcggtttcggccaggatatactcgataaaagaccacttgatagggtttgaaccttccttgttcaaagtgccgatccaagttttctccagggcctttaaatttttgaaacggtgtgcaaacatcacgttgaacatgcgcagggtttcatcgtcgaactcgtaggaacctttagtcaccttatcgaagtcggattcctcattaccggcctgtgaaaactcacccagccagatattaaccagcgtagccaaatcctgataaccggattcaagcgggaaaatactttcaatggaaggaagttccattaaaaacgactgcaaacgctgctgccagggaatacggtaaaaggccccgaggtcctccttcaaacggctgtagtcaatggaacttgctttcggaagagcgatcatttcaaaaccggcagcctccattaacgcagctttagcgcgaaggttatacgggcggtcctccagtgagaacatttcaccctgcaagccccccagctgcttttcgtcctggagattgaatttccctttaccgtccgcctgggcgttgtgttgtttccctttgcccggatcatcttccgcagcggccgaaagttgagcgataataccggaaagctttgttatttcggcatccttcttggcaattaacgcggtgttgttccggttctcgtcacgctgttgcgtctgcaaggcttcaagctgttcctgcgcttgtgtcagacgtgccgcagtgtcacccaacaaaccacgaaggaaagcggtagttttaggttcctcggtttcctctccctggttcccgtcttcggattcgtcctggaaatcgttttcgagggacgctttaaagtccgtgaggaatttttcggtaaaaccgtaatttttcagttttgccacttcctcgaccgtgatagagtttttgtcctctaccttgctccattccgacagacccagcagggccagaatgtgagcggaaaagctcttaaatttcatatatacaaaattttgaagttaatactatatgttatacatctcatttacttttctgacggtggcctgtgccagtacccactttacagcgtcttccagcgtgccgaactggtctatataaccgtttgccacggctacgtcgccggtgaatatctgtccccggaaaaggggaagttccggatcgtaggcaatacccagattccgactgatcgcatcacagaaaatacggtgcatgactgccagacgttgttttataggctcttcgttgttctctttttcaatcgcgcgggtttcatagtttttcagatcggcactatccggatagatttcccggtaatcaatgccctgtttcctaaaatattccttaaaagattggtaagtaagcatgatcccgacggaaccgacttcacacataggggaagcgataaaggttctaccggcggcggttcccagccagaaatgggcactccccatggtaccggccacataggtagctataggcttggaagattcggcaatcattttagccgccaggtccacatgtgcgaccataccgcccggcccattgatccagagtaccgcaccgcaaatcttaggattatcgaaaacatcccggagctgcttttccaggcggtaagtctcccaggaatacaaggtgccttccaggataatgacggccacactgtcagccggcaatgtctcatcgtccagttcccaccggttggcaaggtaaggcgtagtagcgtaggcggttattttattattgtcgagccgtttttcgatcgcatccaggttgccggctgcaacacacggcacaagtaaggaaagcaaccggtaataatcattatcagcgattgcccaaggtgctgtaaaaatctcctgtattttgtccacgttctcttttttacggcaaagaaaacgcctatataataggtagagaaggactgaaaggaacctacaggaacgcatcaacgcccggacccgtaccggacagggtgcagttatacaggcccccgccgatctcaaaagaaaaggtaagcgggtaatcgggagaaccggaaacacgggtgttacccgtttcgtcagtatagagggcgacaaagggcgtcgctttcaggttttccaggtaaagcgtcttattttgcgacacgtcggcaagcttgaaggtatgttttttagtatagacgtcttcatttttgctgtcacccggttttaaggttcccggtacgatcataagaatatcaggttttccgatagagcggataacgactttcgagagcacgacgccaaaatggataatgttgtaaacgggaaccagttgcaggctatgggcggcggatattaactttcttgacataattacagatataaagcattgataatcaaacattcagcatttttcggacgtttttcagccaaaaaccggacaaaaaaggacaaacagatacagttggtaggtaaaaaataacttgcttttttacactttttttcggttatacgcccttttcttcttacgcctgaaactgtcccgccaccgctggtagtttttcagcagcccgtcttcctgaatggaagagatatcatactttttcaggaaggtaaaaacggtttccttaaactcgattccgtgcaggtgcttgttttcgtccatgagttcgtgcagctcggcccacatcagggcacgcagacgcttttcaagaatggcggtaccgcgtacggaaatgtaattgaactgttccggagacttgccgccggcaaaattggcctcccggcggtcaggcagcataaactccaggttgccgcggtcagccggacaatttaccggccgtttctccatgagatcgtaaacggtcacatagatatcggacgaggaaggaaaacggacggtaccgaccgtttcgtcgtaatatttgccccggacatactcggccaggtaggattcgatctgtattcgggtggtaatcatagcaataacattcctttttaaaggcaaagatattcctttatcggctgttggtctgccatttacgggaaaatgtaggctttcagtcgtcattttgataaatatactccgggagaataattataatatgccttttccagccgccacacacccgacattttctctgccaggctgtgctaatataattcggtactaaatttttgtaatttcgtaaccgggcaaccgacaaaggtaaaatcctgtatcttagcaacttagtaacgttactaatttccgttacaaaaaaatggccggaaaacagtttgtaaccgggcttaccggtagaagataaaaaggccggtgttacaaaccggaaaaattcgtaaccgttttgtaactgcaacttcgtaacctttatttcctatttatttatttgattttcagacttttttctttcaagcaaacaaaggttacaaggttactaaaattttgtatgaaatagaggtggggtatggggagggaagccgggcgggacgcatttgtttccatacgaaaagagggaccgacacattcgtatctggtccctcttttcgtattttataccggctccgatccgtcttatacgcgatgtttgcacctgcttaaaatccatttctttacgtccgggggtatatagcggtgcacgacggccgtatagtcctcgttaaattcatactccaggtagttgtcgccttccaggataaaaacacaggccgttttgatgatccattcgagctgctcgcccgaatagcgttccagtgccaggacggtaccgggtttcatacgctccagatagcggtagacctgttcggcgaatttccggaacctctcgccgctgttccagagcgcggtaaactcggacatgctgtttaatttcaaatgcgcgttattcattcatccggtcgttcatcaggtacaaacatgagtgtcggatcggccggttccgttccaccaccggcagccgtttccgccgtgccgcatgaacgcagatagatcatgtcggcggccttgccgtcgttatccttacgtacaatacgcccctgggagttgcaaaggtccttcgggttgagctcgtcaatgtaagggcaaagggccacaaagcctttgagggcctttgtaaaacgctgcatcgtgattttattcacaccggaaaaacttttgtaatcagcaaaagccttttcacggacgataaagctgtccaggtgctcgctgtccggagagaaataagagttcgcccagtcctcaaagttattgcccatatcggccttgtatttacgcctgataatgttttccatgggcggaagcaattttatagattcctcgcaaagggaaaggtaaaaacggcagcactgcaagaagaaatttatatcggcgttccactcgttctcgctgtaagtcttggaaaacaaatccttaccgaaatcgtcccggatagaacgcgtttcccggtagtcgttatcttccgtacgctggtggtagtagtcggagaataccaggtacagcaaacgggtttccgtagacggatcaaaatcaataggaacgtaattagttgtaaatcccagcttggccgattcctcgaaaggtatagtaaacgactggttgttcttcgggttcacggtcatatctgatgtgatgatatcgtaaaacaggcccgtattaagataccggtcgcaatcatccaccaggataaagtcggtatgctggtttacctggtcgaacacatgcgggttatccattaacttgggattacggccggaaagcttgacggtcttcataaagtaggaaagggccttgaacatgaacgatttgcccgaacgtccgttacattcaccgtcttcaccgatcttgttatccatggcctgtggtgcccaggcacgcgaaggggatttataacggtgcaacatatagccgatagtaaagatcttgttgataaggttccttttctgttcggccacttcttccgccgtgaggccttccccctcgatatcgaatttatgtttttcccggtaggattccgcttcccccacgctcttgtcgtcgaaattatattccagttccttacgccagtaaacgcggctcgaattgattacatagccgaaaaagttagacgggacggcattgatccggatatcaaaaacatcgttcccctctatgtcttttttacgggaaatggtaaacatgtcttccattagacggactttgtgtttcaggacgttttcttcccaaacgtagtgggacaatgtgctgccgttggccggatgctcctttataccggtaccgcttacctccatgctgcaaccgggaaagaagaacatctgcgtattatgggtataattggtaaaatccagttcgatctcctgcaagttgtccagggccgtatctgacagtttggggctgttcagaataagattccttatatcgcgggataaaaagctctcttgggcccactcacggataaacttccggatatcctttgcctttatcagttttacgatattgccggtaatacggatgtatttcgttgaactggaattttcatcatgaagcgaatagaaaccgttaagacgtaaaaagtagtgaaggcagtccgcgtctatattgtgatcccattgccgggatttctcgttaaacttggaataccagaatttggcgggcatggcaagcgtcataaggttacggaaatcttcgttcttgcttcttaattccatgaagtcccggaagtccttacgcggtttgccccgctggtcccggtaagtggtaagccaggccggtagccagatcgtatggatatcgataaagcgtaatgcaagttccgtacccttcaccctgcccgtcgtgtcgatatcgggtatgttatacaggacctcaacgtatttcatgatctctttatagtcctgttcggaaagtttatacgtctccgaattaaaccagatcggggaaaagcccagcgatttaacacacagggcgtcgcgctctccggaacatataaacgcctcctgcagcttctgctccttatagggcttttccgcattggccggattctttttaaaagcggcttcctccctggaattaaattcccggtataaggctttcagttcggaaaggccgtttatatagtctttcggcttgacaccttccggggtgtaggaaaaacgccactgcttgtccggattcaggggctcgtatattttatagaacttcacttcgggcgtgtcaccctcggccggttttaccagacattcgcgcataaagatagggtatgtcgcagtcgcgtatttataagttacctcgcgattttttacataccctatgtatttggccgaataccagtgcagggcctcggcgttctcctgggtgacacgggggccgagtatgcgtaactgctccggggtgagatgatcggcaagctcgaaaattttagtaccgtctttctgatcctgggaggccggaaccttacggatatccggcttgtttacgttacggttgagttcatcggttacgttgtacatggatgcaagtttaaggatagcctcgttaaaccggaggccttcctcatacatgcagatatcgacagggctttgagccgttccggtatcgccgaaatccgttaccttataaacctgctgggaaccttcctttccgaataacttgatacaggccgacgcgtcgtcctctgacggccggcgtttgaaatggcggttggttccgacacaatcccgggcttgcggataataatgtagaattatatccagcccgttgttggttactttgtagatgtcttctgcctttatcatcgttataaagttacatggttacttattcttcgttgtcttctttccgtcccgggcacatctccgtccaaggttgatacaggaaaacgaataataacagccaaagaaaagcggttttacccgtataataaatgacaaaggcaatcagccccataaaggcaaccacgatgatagcgtgggcgatgtattttaaatttttatctttcattgttcaaacatgttatactgaattgaaaaaccgaatttgcttaatctcctttcctggagaagggaacgtttgtcatgtgaaggcataatggccaccaggttctttgtatcgaactggtaacctttcttccgcatctgataacgtaggtttcttaggcgtctgtcttctttcatggcatttcgttaagatcgtcttagtttacagaagacatggcacactatcgcaaaggatagcgcttaaatcctcctgtatagtttcctgctgctctctgttcaagtgtaccaggaaataaccttttccgccggaaagattcttaatctccgccagattatatttccggtccaccgcatccacgaacgcaggggattccatggggcggaagctactgaatattttataggttccactactgccttctattcgtagcgtggttaattcatcgggggtggtaattgttgatttcatttctgatttatttttaattattcgacttgttcctcaccttcacgtattagggtaaaaggtagtttggtaccacaattcacacaataagctgttttactcttgtttaaggaaactccgtcggaatattccccaccggaatatgtaccgtcagaattatgcacactcgtgtaactcattctaaacagatcactatactgataaccgtaaaaaccattgcaataagggcaaggaagcggttgtgcttcagttacttttatggagatttttttgctcatttctgttcttgatttgaattatttttcaccacttatttttaattttaccaattcaccaataggataggtcgtatgtttcggtctgtttattttcactttatgagaagaaagaaacaacggaacagattctattcgatagaaagtgtagtaagcttctttaggagccgtttttacatatttctttaaatattcttctgctttatttctcgtatcaaatgcggcaaggatagaaaaccaaacgccgtcttcttcgtattttccagattcccttttagttactatgtaaattttgctcattgttgtttatagctgtgccggaggatagcatcgaactaccaataacacccgctttcgcccttcggggttatctccacactccggcggttattatatggagcggcaaaagccgccccggttatttattcacttttcttttccggaagaaaaacaaagtccgcccaaatatcaaggaattgtcgaccgcaatacgctgccagttctgacgttttgaaggcaagccgaacgccgatgtacgcattcgtgctcgatgaatcgtaaaacgcgaccgcaaacgaaacaccgcccaacgcgtacgcgttgttgaacgaccgatacaccacacgagacttttcttcctcgtccaacttattgtattcttcccctgtataaagaataaaccaaggataataacggtattcatcctctataaattgaggttcccagccttcatttaaagccttgacaatgatacggagtttcaggaaagccagaacgtcaggttcaagaccgagggatattttatcccggctccatgcttccgcatcaatgccaatttcacggcaggcgtcctcaaacgtcttaatacgttcttttacgtctttctccggttcatcaataagagttaagatgccatttctccagacggccgttttaccttccggaatttcgatttctaatttctttgatttcatttttcttttatttattggttttcactatggaagatttttacgcctgttacttcctcgatcttatccttggcaagttcgggaatacgacaacgactaccccgccaattacgaaaggtatgtaatggcactttacatgcttctgccaatttaagggacatttcagaagattcttttaccggcaaattcaaaaggtacattcttagtttctcgccgtcatcattcctttttaatttttttttcgtcatacctttgtgataaatatactcattattattaactttacatagcaaaggtataattattttcaccacaagtgaataagaattacgttaataaaagttataacaaagatataatatggctaatttcttgttaataagagaattatgtgagttaaagaaaatcactatacgagaacttgcatcacgtataggaaaagaagatagtagcatacaggctattgtcaggaatggaacaacgaatacaaaaaccattgaggcaatagcaaaggttctggaagttcctgtaggtgtattctttgataatattcccatacctggaataaaatcaaatgaacttgataaggatgcaaaaatagctgatttagaaaggataattgaggagaaggaacgtctaatacaagtcttattaagtaagaaataacctgtaatagataagaaatgtaggcatattgtaggctatacaattatacaagcaattaataatcaagcgattaataaacgttacttgaatcacaaataaaatccgataacttgaaaagagttatcggatttattttttaattactttcgcttttatagacaacttccttttgcagcgcagaagataaacgattgaacatgtaggtcagaataagagaagttctttaaaacttctctttacgctcaaacttcccttcctcggtataatatttccaagtacccttaggttggttatgcgaatatttaccacgaagtcttaattttccattttcgtaatattcacgataacgtccgtgacgttttccctcttttacttccgcttcactctttagtgctccttccggataaaattcacgtagaacatttccttcaaacttttcgacatagaaacgtttcaattcacttaactgttctttctcggtcacaacatcttcattcatttcttcatcttcctcatcggtagcaacctcaacaagttcttccggttcgtatggactataatccataacatattgtaaagaagcagactggctatctcctatcacttgcatagtccaataagggaaagaatacaaaacatccttatttgactgtatctcattccatgtggcaggattcatcattagcttcaactgggaatagaacttacgtacatccgtatataagaaaatcgtagaactggatttcagatatgaaaaagcatctttaaatcccggattgtctttcaacaagttcttttgttcataatcctctacgaatgagagtaaagatgcagctttattactaaaaacaacataatcatccacataagtataatagggtttctcgaacttatcaaatagttttccgaaaaacagtcggaagaaccctttcatctcgacataattaatttcaaagtccttataattaacagttttaattttaaccggagtacgacgtttgaccttcttttctataagttccatgttctcacgtgcatcctttatactttttgctctgatagccaaaaccagttcgggttcacgcccaagtaaccccggttcagattgtgtaatagcaaactctccagacatccagctcaaaaagttttcttccaaagagataccgaacagtccttcaatcttttttcgggaattttgatacgaatcatacaactgtttatcatgaacagagagggcattttctaattccttcacaaaagtcatcggattattaaaaccaatattcgtataaagggccgttcgtccggacaagatttcatgcgctttcattttatgctttccggaattcagcaaggcagtgatataaggatctactgaatctttcttcaacgtataacctttcacctccattttatccttgcccatattcaagtaaagaccggcaaaattcatagaattactgaacatatcaatatattcattccttgttcccaggtagatagacataaactgtgggatacgctcatagttgataaaaaccctgacgagtcccttaccggaaactagtttctcggtttcaataaaagcttgatcaagtccgattttaggtttgttacgtgaatcaatagccgattcgataagtccggaagtataagaacctaccagatgattatccacaaaagcaatataaaagatatcacgcgtatccggatcacgcatctcaagaatgttaatgccactatgcatccggttagtaacagtgaagccgctcattacaagaaccgtctcaagctgatctttcaccaagtccattttagaagctttctgcatatccagaatgagcagaaaatcccaatcagtcgcgcgggttttatgaagtgaaataagcatatcccgtttgccgacaagtgacaacagcaccttgttacttttcacaactgaatcaagtttttccacactcttcgtaacttcctcaaaagacttcgcttttttcagacattgccatgtttcgcttccgctaaatttctcccaatcttcaatcggagctgatgattgaataataaatgccgcattttccggaaccagataaatctgctgaatattacgatcgggtgagataaacagataaaccacggagtatactacatataccgccaaagccaaccctatcaccaccaaggtacgttttacgatttgcttactactcttttttgtcgtgggctcggcatattgctcttgttccctgttgtttaattcattcatggttgatttattaatataaattatagtcccattggtatcctcagtaaataccaaataataaagaatagcgtccatgcagctaaaatacctacagagtagcgccaagtgtatttgagtaatgtcccataagtaacttgtttatcatattgcctcatatatgtcaataccagaggcatataaaacataaaaggcgtaatagcatttgtcgagctgtcaccaatacggaaagcgcactgtgcgatatccggagagattcccatttgtgcaaacatcgggataaagataaaagacataaatgcccacttggaagtagcagataccataatcagattgataaacgctgtaaacaggataaagagaacaagtgcagacaacggagccggctcgaaagaagaaagcagatcagctcccataatagcaagacacttatccaaatgagaatactcgaagcaggcgaacatttgagcggcaaaaaaagcaataacaaagtaaacacccaaaagtttcatcggttgggtaagcccttcaatcacatcattgtcggaacgataacgaccggaactgaacccgtaagccattcccgtgatgcccgcccctaaggaaagaagaaaaagaattccggcaataaaaggcgaatgcatcaaaccaccgttcacgccacgtaatatcccatgagaagaaaacgtaagccataagataagagctacataaattcctgctacaataatcgaaatcattatcgcccgccgttctttacgggacaagggccgataagcttccactttcacgcttccttcatattttcctaaagcgggaagaagccatttctgagtcagccagtaaacaatagcagtaattactacggtagaagcactcatgaaaaaataattgcaaagtggttcggtatttccctgatatcctgtctgagctagtgcagcttcctgagtggtatgagccagcaacggatccattgtgcttaatacaatatttgcactatatccgcatgccactgaaacataagccgtaataattcctgcaagcggatgaagtcctacccattggaacagcatggcggcaataggcaataagataatatatccgccatcgccaataacgttggacaacaagccaagaacgattacccacaagataaccctccttttctccttccggttccccactcccaaacggatgcatgcaccaataaatcctgaatgctgggcaacccccagtccgaacatagcaataatcaccatacccaacggtgcaaatccggtaaagttcttgatagcattccgcaaccaccagcgaattccttccggactcaataagctctgtacgcgaatctcctcaccggtttgtggcagcgtcaccttcaatccataaatatcacatatccatgaaagaaagaccactgctattgtcagcagaagaaacatcgtagcggggtgaggcatacgccatttattcttcatctgtctcaagatttattcttcgtcagcctccagattatccaagtcgataatacgtaattctaatgcacgcactgctagacgggtagcatttactcccacccgttccccattagggaaaaggcgtcctataagatcattctgtcgtttttccaatgacttcactccgaaaggcattcccttcagactggcaatcatttctttcgtatatcctaaagccagatgacgtaagaaacgctcatcatactcatcaatatcataactaatcaccgcctcctgacgcttggcatcgttagctaccgattttttgaaacgatctacaatcttttccaaaatcggatagttgaaaactaacttctttccgtccattacagcctgcacatctgttttggtgagcagttcccctgttttcaggataattccgtcagcaccggcattgagcacatccacccataacttttcattcagaatttcacccgtaaatatcaaaacccgaactcctttgtaacgtttgaatatattccggcatatatcaacaccgatagtggttgaacctcccaatcctaaatccagcaacaccaaatcgggaagttgtgcctccattaacggccagaactcattttcggtcatagctgtaccaataacctctgcattgggtatctcatggcgaaaaatctcctctgtacctttcaactccagttttacatcttctacaataataactttaaatttctgttcttccatttccttatctaataactttatatgtgttctttttcattatctgcgtggaatagtaaaataaaccgtaaaccctccgccttcggccggttcggcattaatacggcatcctctacgccctgcaaattcatcatgatcgcggattatctgcttacatacgagatattccgtccccctcaattctcccttttctccggacgtcatacgtgccagattcggataaaatagttgattcaactccaacacgctcttttcacgtcttgtatccgtgaaaagaaaacgtatatactcatcatccttacgagcctgcaaacgcaatactccgtcttcgtgaaccgtcaatgcttcatcaatcaggttctccaataagaaacgcaactggtttacatctcctattactcttgcatctatcggagccatctccaactctatcttatccatacggttctttacagactttttgaaatattttccggcagtttcgaaaagctcttgaaccggaatcgtggtccgccggaaagtaacctcttccaactggcgggaagcacatgaactcaaaatagtaaagatccccttataatattcaatcaactccgtcatagtctccactgcctccttttcttctttctccgaaaggttctgcgcattcagccgacctataatttgtttaatcttattcggataataaatcgtttcatgcttgatagtcgaaagacaattatcaagtaccatattctgtacatgtaacatactgtcctcccaagacgcccgttgcgtttcctcatgcgccgactcaatatcacgatatttcgttgccagtttcaccacagcgttaaatacgacaatagctacataacgtgccaccagttcgaaaagcaaacagtcagtttcctgttccgtcccttctcttcgttccaaataaagcacaccgacacattggtgttcacctcccgcttctaccatgagaggtattgcctgacgatgttgctcggaaatatattctcttgaatcaaaacatagctgcaccatttccggcatttcctgtccgggactcgaagcatattccaacagatgtgtcgtttcattataaacggcaatccccatccggtcaatcgtcaacaactcatttaccgagccgaatgcttcatctacgatacgttgcggaatctctttgagcgtactttcttccctttggagcgcttctgcattttcctgctcctgcggtcgaatcagggaagcagcaaatactttctgattaatttcaagtacctgttccaaactcaaacgattttgtatccgcttcctcaaatacaaaagataatatcctaccaaagaaacaatcaacaaaacgaaacaaaggataattcccactgtcttattaatattcgaacgttccagttgccgacaatatccttccaatgtctgatcttctccctgcaacttatacaaatctgtaaacgccgaattattataactatacgcatccaattgtttcaatgccagaaaagcaaccgccgcctcatttcttatatccaatatcacatggtaatccgaatcaaaaagttcgttccaccacagaatctcagcaggtataccttcaccgacgagcttcatataccgatgcgtagcatccgggcgcgcatatttctgataatgctcattcagcaacaatatggcagaatcagcatattgcaaagcaatctcatactgctcatccacattagcgaaataagcagcattggcataatctgatgcagcatccaacaaatcttcataagcagaatccgtaataaccacaatcgaatcggtatcctgtaacatcggaggaatcggatcatacagacaagaccccataccaaacggaagtaagaggcaaagtagcactccaattactttacgcactcctgaaggcaaacggaaataaaagcgactcccttttccaagttcgctttccacgttgaatacacatactcggaacagttcattcgttttcttatatttctcgatgattcccttacaattcatcaatccgaagccactacccttattttccttcaattcatctgcatccgtggcattcttcataccgataacacgtgaatcatacactttctcaccaataatctgtgccacatcttcggctgagattccccttccattatcttctacagaaatctccacataagaatccgtagtacgtgcatacaccttgattacacctccctcaggagtatatttgcgggcattctcggccaacgtatttatcataaatagggtcagtgcacggtccgccttcaccatagcatgggtcggttcaatttctaacgtctgttctttcatctcaaaggcacgacgtccctttcccaataaatcgaacaactcattaagaccgaatgtttcaatattcaggctaagagttccctgcttcatcttgatccaaagagcaagaatgtcattatactcattgatagtagtcaccagttcgtcaatatactgatacttctctttcttaatcttctcatcgtcaatataacctttctctgtcaacttatgtacctcgttcaaaatccggtcaatatatggattgatgccatttacaatcgccagacaagccttctttatcagattctggcgtttattcccggcaatatgctgctcgtacacataccgttgtttttccaattgaatccgttcgtcgctcaatgcctctaccatttgttcattatcggcagcccaaataatatatggctcaagcacatgcaccagcgctttctcgtctttgcttaatcggtgcacaggaacaagtgccgctttcccctcttcgggtatttccaatgtcatccgtcctttgccgaataattggtcaattccttgctgaattaaaggaacattcatcggaatagaagaagttatatccctacataacgataaaatctgttgtagtcgttccacatccacctgatttcgcgttttggaactcttattgaagaaccaccagagaataactaccagcaccaacccaacaatgaccacagatagtacgagagtcatttgccgcgaacctgcttccaatgaaatatagcggctctccaattccttatcctgccgtgtaaagttcagaatatccagataaatattccggttatagtccgatgcgtgcttcattcccaatcctgcatacgaaacgctcaactgctcgcgaatccttgaaatccattcgggaacagttttaaccttctcttccgtaatccacggtactccggtgtaggtcgtatccccttcggcataaggccacaatttgtccagtgtatctgccttataatgataataaagcagatgatgttgattcacacaatccagtgcttttgtcaatgtattgagtgcttccgaataacgaccatgcgcattcagatacttaccgatagacacatacgccccggcaatctgatataaatcatcatattcctgaaatttctcaagtgccaactgtgccatacgcaaaggcataagtgaatccaccggaaaatcgaattggtcgagtgcatgcgtcctccttacccgataaaactcgaaattggcaggagaaaccatcagattagccaacccttgcaaaccattcccttcaaaataagggttcttactttgaacggctgtccgccatgtatagtaaagctggtcgaactcacgaagctttctttcttccggattatttgcttccaccaatgaagccgagcccttgatataatgataataaagcaactgattggtatctgtcaatgcttcatcctccggaatctggttgagggcgtcaatcgcttcctgccgctgctgaagataatagtagtagatagacgaaacgataaaaaactcggtaaacgcatagtccagccgaagtgtttcgtgccggtcggcaaagaggtcactttcttcgcggatacgtttcatgcggcgaagcgcactgttccggtaatcataatattctttgttcattgccgtccgttggcagattttcatcagcccgatatcagcaatcaggagttcgagttcattctttgtcagcttatagacttccttatgtaatgcttccgcacggtcaaagtccatattcatatacgcacaaaaaccaagattattagaagcttcggcttttcccgatttgtaaaaatttacctgtcgataggccgcatcagcatatttgtaggaagaatcaagacttcggtaacgataagcatacgccttcccgttcagcgaatcaatcaaccgtacctcttttgtcggcaccatatccgtacacgaaaaaaaagaggcaaacaacactatacctattatatatagaggaaagcgtgaactcattttagtgattttctgttttcagaaagcaaatctacaaatatttccgataagattggagagaaaaatattttttatacaataagtccttctaaataataagagaaattcctacctttgcaggcaaattaacaaataggtaacatctattacaaaatgagcgaaaaagcaccctttatggtattctcgggaacgaactcgagatatcttgcagaaaaaatctgcgcaagcctggattgtcctctgggaaatatgaacattacccattttgccgatggtgaatttgcggtttcatatgaggaatcaattcgtggcgcacatgtattcctggttcaatccacattcccaaactcagacaacttaatggaacttctcctgatgattgacgctgccaaacgtgcatctgcaaagagcgttgtagcagttgtcccttactttggttgggcacgtcaggatagaaaagacaaacctcgtgtatctatcggagctaagttggtagccgatctactgtcagtagcaggtatcgaccgactaatcacaatggatttgcacgcagatcaaattcagggattcttcaatatcccggtagaccatctgtatgcatcagccgtattcctcccctacatccagtcgttgaaactggaagaactggtgattgctacaccggatgttggaggttcaaaacgtgctagtactttctccaaatacctcggtgtgccattggtactctgtaacaaatcacgtgaaaaagcaaatgaagtagcttctatgcaaatcattggtgacgtgaaaaacaaaaatgttgttttgatcgatgatatcgttgacacagcaggaacgatcactaaagcagccaacattatgttggaagccggtgccaagtccgtacgtgctattgccagccactgtgtaatgtccgaccctgcttcattccgtgtacaagagtccggcttgacagaaatggtatttactgacagtatcccttacgcaaagaaatgtgcgaaagtaaaacagttgagtattgccgatatgtttgctgaaactatcaaacgagtaatgaataacgaatctatcagttcacaatatattatttaataaaagagtcgactgaaaaataataaaatggataatgactgtcatggtcattatccatttttattttacccttcagggataatatacacaaaaaaataggccacgcaatgcgcagcctactatcatttatccacaattctctattgtaatcttccgaacttatatgttccttttttaataacttttccgtccttatcagtttctacaaaaggaccattcttttttccctgtttgaaaaaaccttcaaagcggttaccattcttgtcggtctgtacaccttgtccttcttccagaccgtctacaaaaccacctttatactgcattccggcaacagtttttaaagttccctgaccgttcgggcggttatctttccagtcgccctcatatacgtctccgttactccatttataagtacccttaccttcacgtttattatttttccactcaccttcatacacagcaccgtttgcccaggtaaaagtgcctcttccgtcctgcataccatctttaaagtttcctacatatttatcaccattagcatgataataaacccctgcaccggtacgctcacctaagagataagaaccctcatagcggtctcctgtatggaaaaagtaagtcccctttccgtgttggatatcatctgcccagtcgccttcatatttatcgccgttggtatattcaaaagtaccttttccatgacggacatcatctttccaatcaccgtcatatttacagccgtcgtcccagttcatggttcctttgccgtttttcttgtcatttttccaatgcccggaatatttcgcaccgttcgcccaggtatatgtaccttcgccctcacgtttatcatttacccaatgccctacgtataaatcaccgttatgataatacatcgttccttcaccatgctgataatcctgataccacataccgtcgtaacggttattattcataaagtaataaatacccttaccatgctgttggtcctgaaaccattgaccttcgtatttttctccatcagggaacatataaattccgaatccttcacgttttccttttatatactccccttcgtagacatcaccgttcttaaagactgtctttcctttgccattcggcttgcgtcccttcatctctcccgtatagacgctgccatccttaaaagtataatttccaatctttatttcagtggagaatgtatcttttatttttccgaaaaatccgcttttttttccttcgttatcttgtgccattgctcctccttgagcaaggagagctagtaaaagtgtagtatatagatatttcctcattggttttagtagttactcattaaaattacaatttggacaaagatacgatttctctcccaaaaaagccccctaccggaaagtaatttatgatatctttttacctgctatgacctcttttaatttctctttgcacaaataacgctgcgccaaatcttgtaattcggcaggcgtaacctcctgtacagcttgcaaagaacgtgaaaaatagtcgtctcccaagccggaagtagctataaaaatccatgcatccgacagtgaaaaagccgattcgtagctcctgcacatttcgccaagcatataattgcgcaccatagacagttcctctacgggcacaacctcctgatgtaaacgatcgatctcatgatacacttcctgaatcaacggttctacgtattcattatccgtttccgtcgaaacaatcagtaaaccactatccggatagaacataattcctgccgaaataccataagtatatcctttctcttcccggatattagacatcaggcgactaccgaagtaacctccgaatacagtcatcaatacccgtaacttcagataatccggatgctcacgggtgatagtagtatatcccatttttacggcactttgcatcgcatcttcccgttccgtaaaaatccgtttctctggcacggcaatataagggaaatttaatttcgatgtctgcaactgatattgcccgaatggagagccgaacgtatccttcacccgtcgaataatatcttccgtcaccttgccggaaagaaaaatagagcaattgcccgaatgataataccgttcataaaaattacgaagaacttcgggagtgatagcatgataatcctcctccacgacaatcttcccacatggatgttgttctccgtaaagagactgtaacaaactacgatgtgccagaaaatccaccttggaggtattgaccagatattgttggatattagtatccaaaatcgtatgcaactccttttccggaaacaacggctctttaatcatcgactccaccacttccaacgtttccgccacatatttattcaatgaataaacagtaatgtaagcatagtccgaagaactggataattccagccatgaaccataatagtccagttttccggcaattgtggcagccgtatatttctttgtgccttcacgcagcatccggttagtaaacaatgcctgcaatttctgcgactgttgccagcgtcccccaccgaaaagtatatccatgcgtaccacatcctgctcaccggcattgattacagtcaacggaataccattaggtaacgtagtccggacaggaggaagaatacgaaaatctttcagggtttgtatttcgggttgtatcttacgattcatattatgacctactcttcaaaaattcttctgcacgttctaaatcctgcggtgtatcaataccaatagtttccacttcgctaatacctactttaattttatatccgttttccaaccagcgaagttgttccagagactcagccagttccaaagaagattgcggcaaggcagttatttccttcaatacgtccgtgcggtaagcgtacagaccaatatgcttatagtaagtatgccctttcagccagtcctgcttttcagtattacgctgataaggaataatggaacggctgaagtacagtgcattccagttcttgttaaccaccactttcggagagttcacattttccaaaacggcaaacggttcatcggcagtgaaaggttttaccaatgtggcaatctgtgtagtcgggtcttcaaaacaagcttttacagcattaagttgtgaaggctggataaaaggctcatcaccttgtatattgacaacaacatcaaaatcacctccgatcttagtacaagcttcgtaacaacggtccgtaccacttttatgatcaacagacgtcattaccactttccctccaaatgctttcactgcagcttcgatccgctcatcgtccgtagcaacataggcatcgtcaagtacccctgctacctgttcatacacacgttgtatcactgtttttccgcccaagatagccaatggtttcgcagggaaacgagtggatgcataacgggcaggtataattcccagaaatttcatatctgattttattttaattcttctaatcctttcacgatgtactcccttttcagatcctccggcttcaacacccggtcgtcaaaagagagtaaatcaatatccagacaaactttttcttctttcttatcttccggacgacgaccggcacatttctcgatagctttcaattccttcttcactttttcttcttccgcttcggagaaaaacagtgccacttgattggagaacaacgccggactccggaaaaacaaaggttgtgtttcccgttcggtcgtgaaacgaatggaaggaaacaaatccgctagtctctttcgtgctaaaagcagattctccttccggttgtagttacttccaatgcaaataatacacttgtgcataagaagctgattcttaattaaacagatcgtccaatccggtttcttcaaagacttcaccgtccgacgcttccgaaccggcacaaggatcaaatccctcagggagtttgaacttctcctgctgatcatatcctaaagtcgggtcatcatatacttttttcatatatttcgcccagataggcaatgcagcagcagcgccctgtccataagtcatcgaaccgaagtggatatcacgttcatcacctcctacccaacagccggacaccaatgaaggcgtgaagcccataaaccagctatccgagttattgtttgtcgtacctgtcttaccacccatatcagccgtgataccatagcggcgcacccgtgctcccgttccttcgttgataaccgcacgaagcatcacgagcattttatatacactggaaacactgatcacctcctccatttgtggagcaaatgtagaaatcacattaccctcattatcttcgatgcgggtaacgaataaaggagccaccctgatacctttgttggcaaaggctgtatatgcacttaccatttcaccgacggaaatctcacaaggacccagacagagtgaaaccaccggatcaatggccttattgcgtactccgaaactatgaatcaaccgaaccagttcatacggattcaatttccccatcaaataagccgaaatccaattgtccgaattggccaatccccatttcaaagttaccatttcaccataacgttttttattagcgttacgcggcgaccacggttctcctgtttccgtaatcaatgtctgctctacatgacgtacctgatcacaaggagaaaaattattttccatggcaagcgtatacaaatatggtttgatagtagaaccgacctgacggcgacctaccattgccatatcatattggaaatatacataattcggtccgcccacataagccttcacgtgcccgttcaacggatccattgacataaatccggttcgcaggaaagacttataataacggattgaatccatgggtgtcataatcgtatccttagctcccgtccaagaaaacacagtcatttcttgcggtgtatcaaaagcctttctgatttcctgctcggacgctcccgcttcattcatcaaacgataacggtcagtttgcttcattgcttttgtcagcaattcctctacaagttttgccgatatagacctcgcatacggagcattcttacttcccactttttctttaaagaataatggttgcaagaagctcagatgttcttctaccgcttcttctgcatattgttgcatgtgcgagttaagagttgtgtagattttcagtccgtcagtgtagacattataatttgtcccgtccttctttttattctttgcacaccaaccgtatagcggatttgtttcccaagcaagagaatcctcgtagtatttttgcatctgccagccccgataggtacttttgacaggtttcggtgccgtcattactccacgaagatattcacggaaataagttgccattccttccttgtggtcaacacgattataagtcaatttcaacgggagagctttcagggaatcgcattctgcctcagtgatataaccagccttgcgcatttgctcaagcaccacattccggcgaccacgagaacgctcattaaagcgaacagggttatagagtgacggattcttacacatacctaccaaagtagcagcctgttcaactttcagttccttcggttcacatccgaaatacgtgtgtgcagcagttttaatccccacagcattattcaagaagtcgaacttattcagatacatacttaggatttcctctttagtataataacgttccagtttcacggcaatcacccattcaatcggcttttggaaaaggcgttgaagagtattacgtgccacattctcagtaaatagctgttttgcaagctgttgagacaaggtactacccccacccgcatttttttgaaacatcagacctcgtttcacaaatgcacgaaacaacgctttggcgtcaattccggaatgctctacgaagcgcacatcttccgtagcgattaaagcattgataatattaggcgacaaatccttgtaggccgtatatacacgattttctttgctgtacgaccaggttccgagcacctttccgtcttcagagaaaatttccgttgcaaatttataatttggattctccagttcctctacagggggcatataacctatccaaccttttgaaatagaaacaaagataacaacgatagccaataccacgactgccaataaaatccaaagagcttttattatttttcgaatcatgtttattcttacttaaaaagatgcttaaattaagatgcaaaggtagataaaatccggaacgcaaccaacgagtttgattattatttcagttttgttaaaatatggggtgacactctttcagtagcctggaacaaaaagaaagaacatttgtttgggaaatatagagtaaagagcgtatctttgtctatactttcaaagtgtactcataaaaaggcataaattatggaatatgtatcatcagacaggaagttgttaccttatggtatgatgaacttcgaggacatccgcctggacaattattattatgtagataaaacctctttcatccccttgatagaacaatcagaccgttttttcttctttatccgcccacgtcgatttggaaaaagcctgactttgaatatgctgcaacattattatgatgtacgtaccaaggacaagtttgacagcctgtttggtgatctctatatcgggaaacatcctactaaagatcgtaatagctacttagtaataaaactaaatttctcgggaattaccggagaattacataactatcgtaagagcttggacgaacattgcagaattgtattcgactatttttgcgatgtctatgccgactatctacctgagggaatcaaggaaaaaatggccgaaaaagatggagtagtcagccagtttgaatatctgtttacagaatgtgcacgcgtcaatcagaagatttatcttttcatcgatgaatacgatcacttcaccaatacaatactttctgatgttgacagtttaaaccgctacactgacgagacacacaaagaaggttatctgcgtgccttcttcaacaaaataaaatccggaacagattccagcatcaaacgctgttttatcactggtgtcagccccgtaacaatggatgacttgaccagtggcttcaatattggcaccaactactccctctcgccaagattcaacgaaatgatggggttcaccgaagacgaagttcgcaaaatgttgacttattattctaccacaagtcattttagccacaccgttgatgaattaatagagcttatgaaaccatggtatgacaactactgttttgcacaggaatcctatggtcgaaccaccatgtacaattccaatatggtactttatttcgtcaaaaattatatcgaatataacggtgagacaccaaaagacatgatagaagataacatacgcattgactacgaaaaattgcgtatgctcattcgcaaggacaaagagttcgcccatgatgcttccattatacaaaccttagttagtcagggatatatcacaggagaactgaagaaaggttttccggcggccagtattattgaccccgacaatttcgtgagcctgctttattatttcggtatgctcactatcagtggcacgcatgaaggaaagtgcaaactcaccatccccaatcaggtagtccgcgaacaactgtacacctatctgttgaacacctacaatgatgctaacctaagtttcagtagctatgagaagaacgaattatccagtgccctcgcttatcgaggcacatggaagacttattttgattacatagccgattgtctgaaacgctatgcctcccaacgtgacaaacagaaaggcgaatcttttgtgcacggttttacattggctatgacagcccaaaaccggttctaccgtcccatttcagaagccgatacacaggaaggatatgcagacatcttcttatctccgttgctggacatttatcccgacatgaagcatagttatgtcattgagttgaagtatgccaaatacaaagatcccgaaaaccgtgtggaagaattgcgactggaaggcattgcgcaaacaaaccgctatgctgataccgatacggtaaagaatgccattggtactacgcaattacataaaattgtagtagtatataaaggaatggaaatgagggtatgcgaagaagtgtaatcgtacatatctaaaacgcaaaacaggcgggatttttcccgcctgtcattcatacctaattatatcttctaagataccaattacattgttgccgcctgtacaccgatcactccggcaattgcaccggcaacagcaataatcactttcaaaatcatgctccaagtttttttcatagattttctactttccaaattaaacatttataaaatactatcaactgtcaattagcagacatcaattaaacagacggatcaggtgttactccacctcctccttctccaccaccttcacccggattttccgggtcttcgggagatacgaccacgctgttcttcttcagatattcatccagactgatcaggtccagcttttcatcttcacgggtcgcagattttgtgatgcgcaactctttatttgcctgaaagaaaatacggacactctccacactcttggctgtaatatcctttgccagatctgcacctttcgaacgggcagccaacataaatacacccaggccttcgatattcaccgacttaccttccagcaactgttccttcatcttatccacgaagttctgaatcacactcttgatatcaccgacagaaagcgaagaacgatccctcattttctctgcaagatatttcaaactgacagactgtcccaaggtaatcagatgcggataaaatctcttaggagaattgggaacacgcggatccgttggccgcgtaatgactttgtaaattacactcatactacgtttttttaagattcaaattcaagttattttattcacatttcgttgatcaacgatgcaaaggtgcagtttttatttcgtatagaaaaggaaaaagcccctgccggagttctttttatttaggatagattataaaccgctattaatcaataaaatatatcaacgatcttcccagacagttgatatacaaaggaaattcatactggcatttacgccaacatgagggcatcggttaagtatgtaccgctgtactttccccagccgataagatgtagggattcatgtatatagcatgaattaggggcctacatatttcataaatctaataggatatattcacgattgcctctttaatgctttccacaatataacgaacgtcatcattagttacgtacgaactgcctccctgagcatgctcgtaaatcccgcaccatggaagatgttatcgcccaatactaagcacacgctatcattacctataaaatcggcaccaatcgtgaatgcttgtgcaagtccataaggcgaaggctgctcagcataagtgaagttcaccccatagtcgttaccagcccccagcagatcgtatggggtcgagataatcagaatgtcacggattcctgccaacataagtactgatattggataataaaccatcggtttatcatatatcggcatcaattgcttactgatacccttggtgattgggtacaatctagtactacttcctcctgctaaaacaatacccttcatatgctcttacttgtttatattcgtgtagagagagatgtgctcgaaaagctatcagtctttgtactgtgattcatagtacttttcgtactctccacttgtgatgttgtccatccaagcttcgttttccaaataccacttaactgtcttttctataccttcctcgaactgcagacttggttcccatcctagctctttctgaagcttagaagagtcgatagcatatctcaaatcatgccccgcacgatcagtaacgtaagtgatcaggtctatatcctcaccttccttgcgaccaagcaagcgatccacagtcctaatcaccaccttgatgatatcgatattcttccactcattgaaaccaccgatattataagtatccgcaatcttaccctcatggaaaatcacatcaatcgcacgcgcatgatcctctacatacaaccagtcgcgcacattctcacccttaccatacacaggcaatggcttgcgatgacggatattattgatgaacaacggaatcaacttctcagggaattgataaggaccataattattcgagcagttggtcacaatagtaggcaagccataagtatcgtggaaagcacgcacaaagtgatcactgcttgccttagaagcagaatatggcgagtgaggcatatatttcaaatcctcagtaaagaacttctcaccataagctaagtgatgctcaccactcgaagccttggttgtaaatgaaggctcaataccctctggatgcgtcatctccagcgcaccatacacctcatcggtagaaatgtgatagaatcttttgccctcatacttctcaggcaagctttcccaataaagtttggcagcttgcaacagagacagagttcccatcacattggtctttgcaaatgtgaatggatccttaatacttctatccacatgactctctgctgccaagtgaatgataccatccacatgctcttcttgcatcaacttgtagaatgcatcgaaatcgcaaatatccatcttcacaaacttgtaatttggcttatcctctatgtcctttagattagccagattaccagcataagtcaacttatccaaattaattatattatactcgggatacttatttacgaacaaacgaactacatggcttccaataaagcctgcaccacctgtaattactatattcttcatatcgttttctttactttttttaaattgaaatacatttttcaaggctatctatccaataaggaaattttacataaaaggtttccttaatagtacacttatccaatacagaataagctggacgggtaacaggtgaagggtattcagagctatagcaagactgaatatcgcaatcattattgccaacaatcttggcaatcatctgagtgaagtcataccaagagcaaacaccttcattcgaaaaatggaaaacaccaacctggggtttctcaattatagtgataataacatgggctaaatccaatgcgtatgtaggagttccacactgatcaaaaacgaccttcaaagcaggcttagttgcagtgaggttgatcattgttttgcagaagttcttcccaaactcagaatataaccaagctgtgcggatgataatatatatgcaacctgttgcaatgattttttgctcgctatgtagcttagtcttaccatatacacctgtaggagtacctttttgatcaggtccgcatggaatattgtacggctccttaccgaatacatagtcggttgatatttgaatcaaccatccatcaacttccttcattaccttagctaggttttctggagcatcaacattcagttctcagcaagagcagctagcttctcatcggtttcgcaagcatctacgtttgtccatgctgcacaattgacaatagcatttacgttattgtcctttaccatctttcgaatggcatcaatatcagtaatatcaagataggtagtttcaagaccttctacctgattcacgtctgtgaaaatataattgtcgcttgtattcttagacacaatgcgcatttcatttcctaattggccgttagcacctgttacaagtatattcatactatttaaactctggatataaatctatattaatatcaaaaggactatcaaaatccttcaggaaggcgtgttttgtatctttctctgataacaataccttatcggcattaatcttccaatcaatgccaagactaccatctacaattgaaatgccaccatcagcttctggagcatagaagttatcacacttatactggaaaactgcagtttcagaaagtacagcgaaaccatgagcaaaacctcttggcacaaagaattgacgatgattctcttctgataattccacagctacatgctgtccgtatgtaggagaacccttgcgaatatcaacagcaacatcaagtacagcacccttcacacagcgcacaagtttactctgagtgaatggaggacgttggaaatgcaatccgcgcatcacaccataggagctcatgctctcattatcttgtacaaaattaatcttgtgcaccttttcctcaaattcacgttgagagaaagactcgaagaaatagccacgagcatctttaaatactctaggctctatgattacaacgccatcaatggcagttttaattacgtccattattattgataaatagttctatttgtaccgtcaggcagtatcgaactgcaagctgatgctccacctatgctgacggatatcctcattttttaattaaaccctaagacataaaggtaacagatattaatcctcgtgaaatatatctcgagtataaactttttcttttacatcatcaagcacctcatcatagcgattggctataatggcatcactctgagccttaaacttatctaagtcatttactacaaggcttccaaagaaagacgtttcgttctccaaagttggctcatagataataatattagcccccttagccttaacacgcttcatgattccctggatggcactttggcggaagttatcgctattgctcttcattgtcaaacgataaacaccaatgatgacttccttttcatcagcctcattccagtcactatttgcagtatagtaaccagccttacgcaaaacctcatcagcaatgaagtctttacgggtgcgattactctcaacgatagcactcatcatattttgaggtacgtcagcataattagccaataactgtttggtatcctttggtaagcaataaccaccataaccaaatgaaggattattataatgtgtaccaatacgtggatcgagacctacaccagagatgattgcctgactgtccaaacccttcacctcagcataagtatccaactcgttgaagtaactaacgcgaagtgctagataagtattagcaaacaatttaacagcctctgcctctgtcatacccatcaacaaggtatcgatatcctcctttatagcaccttcctgcagtagttgcgcgaaagtcttcgcatattcctctgccacagaattactgattgcctcaatagcagcattttcttcatcccacttcttattacgttcagatggcaatacctttggatatccaactataatacgagaaggatacaagttatcatacaatgccttactttcacgaagaaactctggagagaataacaaattaaacttctttcccttcaatgccggatctgtcaagaatttgagcgcatacttcacatagagagaacggcaatatcctacaggaattgttgacttgattaccatcacagcatcaggattaacacgcagaactaggtcaattacatcctctatatggtgtgtgtcgaaaaagttcttctgggggtcatagttagttggagcagcaattactacataatcagcgtccttgtaggctgcggcaccatcaagggttgctttgaggtccagatctttctctgaaagatatttctcgatatagtcatcctgaattggagaaatctttttgttgagtttctcaaccttttcaggaataacatcaacagcagtcacttggtgatgttgagagagtaatgttgcgatagaaagaccaacataacctgtgccggcaacggcgattttaatattttcgaatgatttcatgattaataatttgaattgaaatagttgataacgttatatattattgatagaattctttataccaagtagcaaatttacgtaagccatcgcgcagtggagttgaaggcttgaaaccataatccttttctaggggtgtagtatcagcgtaggttacaggaacatcacctggctgcatagggacaagttctttatgggcttcgaagttgtaaccctcttgcaagactcctgcacgaaccagttcttcctgaagaatagtcacgaagtctagcaaattctctggagcattattaccaatattatatacggcataaggaggtacaggtaatccatcctcccctgtctttttctctggagctcctttcattacacggattacaccctctactatgtcatcaatgaatgtaaaatctcgcatacaattaccatagttgaagattttgattgtttctctatttactagcttattggtaaaaccaaaatatgccatatctgggcgaccagcaggtccataaacagtaaagaaacgcaaccctgtagaagggatgttatacaattttgaataggcatgagccatcaactcattacttttcttagtggcagcatatagagaaactggattatccaccttatcatcagtagaatatggcactttcttgtttgttccatatacagaagatgaagaagcataaacaagatgttccaatgcctcctcattacgacatgcttcaaggatgttatagaaacctatcatattgctcttgatataagcatccggatttgtgatagaatagcgtacaccagcctgtgcgcccaaatttaccactacattagggtgatactgagaaaatatgccattgatagtttgtttgtcagaaagatcacccttgatgaaagtccaatcaccaccaacctcagacaattgctctagacggtagttcttgatattcacatcatagtaatcattcatattgtcgagaccaataacctttacgccctcaacttccttgagtaatcgtatacacaagttgcttccaataaaccctgcagcacctgttatcaaaatcgatttatcttctaaacttatcttttccatctttaccattttggggattaatatatcgtattaatttacttaccgaatttttctactgcctcgtagtaagtgtcaagagatcctatatcgaaacgactagcagacattttccaggcatgtatttcggtattatcaaccatataatgagcaagattaccgggagtatctttgccacaagaattggcaacagagtagcgaacgagttcaagatctttctttaaatatatataaaatggaggtactgcccaatgagactttggggcttgtggcttttcttccatattgagaacatgcatattatcatccactacgatcacacctgtacgttgaagtttctctatagatggctcttcatggcacataatgcagctagtggccttagattttgcaaagtctacaaactctgaaaaggagaagaacagcaaattatccgctgcaacaactagtatgtcatcatttatattaagcttatccaacgcatagagtaaatcacatacagcacccaatcgagtatcattagtggaagttccatcatctatgatagtaatcttcttgctatagttctgctcctttgtccaatcttcaaagattggagcaaacttatgattagtgataattacatgctcatcaatgtcatcaattttatctatatcgtcaagaatacgaccgagaatggttgaattaccaatcttcaacaaaggctttggaaagttctttgtcaactcccccaaacgagtcgcatattcggctgcaattacaatgtttttcattgtataatattcatttttttaattttcaataaatcttgcaccatcatcaggtttaacccaatatgttttgaaagtcatttcgtattcagggaattgagcaagatactgccttgttacctcagcttcaatactttctttatatgctggatctacaagtgcaataatagcccccttgaatcctgcgccactaaatctgccaccatatacaccagaaagtttatgcatgatgttatatatagcaatcaattctggagaaccacactcataattatggatactactctcgcatgaatcaaaactcaatttaccgaagagttacagattacctgtttcccatgcggtaacaccttgtctgactctacgatattctgaataaaaatgctcagctcttctggaaaaccgagcaggcataatatctcttgtcttctcaaaagattcttttggaatgtcacgaaggaatgtcttgtcgaatgtctttagtggttgatctgcatatgccaaaatattccatgcagccgttttgcactcatacacacggagattgtaatcagagttcacgagactacgcgtaaggccactaaaaaatataccaatctcaaaatcaggcatagataaatttctattgattattcgataatgattagaatcacaatcttaagaatagcagactattcttttgacctaaagcaatacatgcctgatccagtaacccgttgttcaaacctatatactcacgttccgcttcagaagcaataaggacaacctcaaagggctttaaacttataccattcgccttagcaaatgccattacgtaagctattagcacagctgcggaagaacttatgccaccaacaggaagagagccttgcaaaacaccgttgataccatacttcagattaaattgctttgacaaagcatatttagcgctgcgcacataatcaccccattgtccttgttttatctgtgttttggtcgctatatcaaattcgacaaatccttcaaaagagagggattctagatgaacctggctgttttcacttggagtgaaccacaaatccactcccttattgatcgcaaatctgttactataccgtgttgatggtcaacatgagcccccaaagggcaaacacgataaggagaaaaaatatgatattgataattatccatatgtatttattttagtggtatcaatagctatacacaatatttaattatcttattaaacaacttttgctaaccatgagataaatctgcctcttatggatatataaataataccaataggagtccaaaagacttcaataggataatgttttgacaaccgtaatgaatgattaatccattaaaaaaatgtagatatacgactttcataaataacatgattctctctaacgtcgtaatgtcctaaattaccagcctttaaaatttcactaagtaaaaagcggtcttctttctgatttggcttgcatggtaaaaattctttgttaaatccgaaagcttccatcagaacccacataactgcagaggtaaacttaaacattgaaagccgttttataattacaattatatcagagtttctattgttaatcgataagaaatataaatctaagacttgtcttaacccaactccctcaacaaggaaataccaataaatatgatgaagcacatggacaacattgaaaagatgagcagggacaatcagattgttatttttgtttacaacaaaacttttctttccaaattttcgggataatttttgaagtctataatttctaatgagattacgacttatccatggcctaaaatgaacttcaacatcagtatttttgaaaaaatccacatgtgtatgcatatagtcaaaatggtgtaatgtagagtttttttattcatttaatagtcttaataatatttccatcaaaccatacatcaatatctccataataggctccaatactttgtccctttaaaatacaattatataagccacattcattcagtgttttctgaacttcttcacattgtaaatttaatattttattacgttttaccaaaagttctgtcataccaaaccattttaatattaataattcatttggcatttgactttttggtattttatttaggccaacaaaagtaattccaataagcgattgttgggaagcgatagtaaacgcgttattccactgaatgttattgggtggaaacgataaatgagctctgttaccaattgctatttgaataagttcaaagaacaaaactacatcctgcctatctctttctcttttttgctgtttattgggcatgacatcaatcaataatttacattgtaagtttccttcttatttttccattgtataacatacgaataatagaagaaggaaggagtctgagaatatatctagctattggaaatagcgatttataaggagaaattccaaatagtttatatattcctttttcgtgaactttaaattcaagattactatccttcctatttgatctacgcttataaacagaatcgtttcgcctaaaattaagaagaactttatcaatatttgccacattataacctgcagtaagaatatcaaaccacagggctaaatcttgagatgtacgataattctcatcgtaagaaataccatcgtcaaacattgactttcgcatcataactgcaggatgtgcaagtggatttgctttatatatgagtttctttgctccatctgtatctaacggaaactttcgtacgcctagattttcacaaatatcgctaaattcttgaatataagcaccgattacagctacatctttatgtgtatctaagaattcagattgaactgcgaatctgtctggtcgtgatacatcatcactatccattcttgcaatataatcagtatcaatagctgtaatacccttgttgagcgactttgttaaacctatattaacctcatttacgatgagcgttatgatatctccaagctttgcaatccatcggtcaagaacttctgttaaatcaatgccgacaggcccatcctgaacaagtattatcttattgggcttgcaaatctgatcatcccaaatactttggagtgaacgctccaagtattcgggtttttcagatttgtatacggacattaatacggatattttcttactcatactaataaataggagtcaaccaatccattctatttgccaatttacctcttacacaatcgagataagtcaagtgcaagcgctttgtaatctcaccctgttcacctgaatctacttcataccggtcgatagtgtagataggggtaatctccattgcagacccacaaagaaatgcttcgtcagctaaatagagttctgtacggtcgatagtacgttcctcaaccttcaagccaagttcttccttagccaaacagataattgtgtcacgtgtaattgattcaagtacactatctgttaatcgaggagtaactagtgtatcaccctttaccatgaagaaacagctaccaggaccttctgccaccttaccaacttcattcaagaaaatacaagtgtcgtatccattgcgtaatgcttcacgctgtccaacacgagagtttatgtaattggcaccacacttaatacgtggggagaggttctcatcactgatacgtctccatgaagtaacgcaacaattcaaacctttcttattgtattctgcacttgttcttccacgtgggataggtgcaacaaacatctctacaggaccttctgatccccaagagccaaaaccatcaacaaataaagtctgtcgaacgcttaagttctcatcatattcattagccttaacagtatctaccaaagctttcttgaaatcatctttggtatatttcagatcaaactggattaatttagcagaacgaatcaaacgatcataatggtcgctcaaacggaaagcataaagttgattggtttcttcattccaataacaagggattccctcaaatacattcaaaccaaactgtgatgtaggtgacagtacattcaccttggcatcgttaacatcgagaatctcgcccttaagccagattcttctatgagcaacatcgtacttcatatctaaatatcttttaaaagttcttattcttcatcaggaaggtgagcaatacgctttacttcatcatcatccaattctgcagattcctctgcactcataccttctcgctggtcttcattgatattcgcactttggaataccttgataactgaccaccaaagaattttgatatcaacccaaacaccttcactcttgaagagatcgacatactgaccatcaaaagtcactttctcatcccaagagttctcgttacgccccttacattgagccaaacctgtgataccacctttcacttggaagcgcttcttgtacttcttattcagtgtatcgtaatcaccaagttcgtatgttacacaaggacgaggtccaactactgagatatcccccaacaacacgttgaagaactgaggtatttcatcaagactagtcttacgaaggaatgctcccactttggttacacgtgggtcattatcgtaagagaacaatcctgtgccttgcttctcagctcccacacacattgagcggaacttcaacatctggaatattcgaccatcctttgttctacgaccttgcttaaagaaaacaggtcctttggaatccgtcttgattgcaattgctactataatccaaactggtgtaagtagcaaaatggcaatcgaacaagatataatatcaaaagctctcttgataaagagatttaaattatacatactgattgtattagaatgcgaatgtatggaagatatcatcaaatacttcacctttcttaattacttctaccttctcgccacaaatatcaagtacagggaagttaggcagaatgaatggtggtttcattacgagtgaatagctaccacagttgttaatcacgatagcatcctcacgaccgagtttaccgtcatagttatgataaagtacatcaccctcgatacatgtgaagccaactaagtcaagctcactatactcctgctgttcaccacccattgcaatgacctgcattggaggattcacaccactcatgctgatattcttctgactaccgagaacagttgcgatatacttgccacgaacattctttatagtcttaacagtaccaacaaacttcatacagtcgcctacaacagctgaacccggttcgataattagctctggctttacgctcttatccttcaagtattctgcaaatacagttgctgctgcttctgcatactgctggtaattgggtatctcaccagaaaactgagccttcaatgaatcgtccatcttaccaaacaagccaccaccaatatcaatacgctctggaataataccaaggcgatcaatcaactcaaccatacccttagctcgtgcgggccaatattctatctgacgcttagcaaaatggcactggaaattgtagaagtgaacattcgtagtatcctgtacataatccaatattttcttaaaatcgtcgctatctacatcaaaaccgaaacgacttacaacaccatcgccaacctcatagttacaacgaataccaagattaatagtattgcttggatgacgcttagcgatacccttaataatatcaagttcctcaatacagtcaacattgtcgataccaccagctacaagaaactcctcaagcttctgtgaattcttgataggtccattccaaatgatgcgattgtgcttaacgccacaacgaagcgcaatctccatctccatctctgaaaccacctctgcgtagccgcccattttgtcaaccaacttgcaaaacttaggggtataattagtcttataagagtaagcaatattaaaattaggataaatactgcggaaagtatctctcaactcgataaagttcttctgaaactgctcactgtccaaaagatagaaagcatcaccatactcctcacggagatttgtgataatttttttgtctattttcatatctaatatttattcttatttttgattttatttacaatcatatttactttctcttcaacctgttcatggtttactttgaaatagtcaaccactttttgagcttctgcttcgagtgctcgaatctcacctattccagtattgaagatgttacgaatttcatttagatcggtaatcttctttgtatcacagaaacttctgcccacaatcacctgagtactaccaagacgataatgttccttcaagacgaatgaacctggtaaatcgccaccatgaagacctgctatgccaccaaatccaaacttgatgcccttactcttaatcttattagctagtttctctacaataccatcggtaagcaattggaatatgaacgtcatccccattgccaaatgaaggtcattaagaccaatgtgaatcatatcaataccaggaagattcataatctcgtcaagtaaaatagcagcctcaggagtttcaagcagcaaacaagacttcgcctgcttattatgtttttcatttgcctgcttcacaaaacaaaggaaatcacctacctcctgaactgtgtgaaaaaatggtagcataatgatatcagcacctgcctctacagctttacctatttcttcctcggaatcaaaatatcccacatggtttttatgaataggattgacacgaaccaatacctgtgacttacttactgcttcgcgcacattgcgtatatcttgtatggtatgatgattctggactgtatccaaaccaccttgtctatcatccttgccgataaattccatatcgacaaatatccaatcaactccagaatcctcagcaattttcgcgacttggggattattggttatgtatattaaatctaacatagtacattactttaaaaacgatttaataggctttgccggtataccagcatacaaccatccttctctatctaaattttttgttactacagaacctgcagcaactataatttttggcgcaatagtaacacctggcattaccatagaacctgcacaaagccaaactccttcaccaatgtgaacaggagcctggatatgctctctgtttttacaaatacatttattgggataatcagatgtatcaagtcctgaggttaaaattttaactccatgacttattgttacacaattatcaatttttacccccccacacactgaatatagcaatccgaattaagagacacatcataccctaattctaaccttttaatattaccaatagtaggtattccattaatttgtaaagatctcccccatagtattgggcgaaatagtttgtaggattcacgccttaatttatttagaattcttaaaaacataattatagtcaagttagagattattatataatcaaccaagatttttctaggaaatactcgtttgaatattcaccttttggagcgacaacaatgcttccatttttgtcttttcgtaaccaattaccccaccaactaaatgtacttggagacataatgccatgctcacaaaatgaaatagaaaacaaatcaactaacgcagcatcagaacctgtattctcgacaaacaacgaattgtctaatttattactaaaagtgtctttacaccaagtaatatcgtcagaaaagaaacaaaaaagaggattctttactttttctttaatgattttgatagcacttaaataataatcaacatcaccaattacgttacctcctttaagagaatttcgatttatgttattgagataatcacctcgtctaatatgaacagcgactgtatttgaagagtctattgactttctccaatcaaatactttttttaaaataatatcagacggagaaaatatttctaataattcttctcgaaaaggtttaaaatatttcgaagtctgccaatatccatcatagaaattagtactgtctataaaataaggtataatactgtaatatctatgtaatttttccatgaataaaaaatttttatttatcaaaggaagattaactcctgtattatatcttattacatgactaatatatttattttcaaatggtttaacccaaataggcctattgataatttccaatttaatattaggaaaatcacttacatcaattatatgccttctagtaacatatttaggttgatttaaaaagaaatcaacatcaaaaaaaagtttatcacctttttccttagaaagtgcataaccaaatgcatattgaaacatctggttacaaagtccaccccataacttaactataatcatttttttatacgaaatgtagaaattaacaaactatgatcagaaaaattttctttttgaacttcagaatataaacatttaaaatgatctgaatataaaatatgatctaagcgaaatttaagtaaattaaaatcactatatgtaattccaaaaccaaatcctccgaaccaccatgagtcacgaagatttttattttctaaagtagacaaacaattgctaccgcatacatcattaaagtctccacctactataaatggaacatctgaatttattgccttggatattaataacgattggtttgatctaattactttagcttgttgtaactttgagtaatatatttttggcttgataaaaaaaactaatttagtcttagaagcttgtagaagttgtccaatattatttgactctaagtgacaattaacaatactgattggtaaactattataatcaatacagtaaaaatttataagttcattcttgctaatattagacacagacttaataggatatttactaaaaatagcattctgtccataacttctagttcccacagtgtaatggaaatggggatatagacataaaagactatctcttaaaatagcacatctgttagtatcatattcttggaagagaataacatcagagtctatcttttttatcacttcaaataaaatatgaggattatatctgctagtatccaaataagctccctgagagtgaatattgtaactaagtattctgaatctgttgccagaatcactttgagaatgaaaatttatagcataaattttaaaataccaattaaatagtaaaactactatcattaatacagacgcaactttccatttctttttaaaacacaatattacaataactattattgagaggcacagcaatactggtaaactcagaagaataaaatattgcattactaattaacgttttccattcataatactccagcatctagggaaaatcgttcaataaattgggcagataaaacacaaacgatataagctaaaataaccactgtgaaatatttaacaatctcgtaattaaagagcatagacaaagtagggtcataaaccattcctgttaatgtaattactggagcatgcatacaatatacaaaaaaagaataatgcatgaatctaatatctggtatgttatttttaatgataaaccgaatgacaacacaacaaatgcagagaaaaattattgcaagaaattggaatgatgaatgattaaatctttttgcaatacatattatcatgtttttgtttagcatagctcctaataaatataaaggcattcaataaagaaaacttctttgactgacaatatttaaagatgttaagcatattaatactataaagatatcgctcgatagatacttaaaccgtaagaaaatgggaaaaagctaccattataacgaactatactaataaatccatgatgaaaaactatcagtaacgatagtagaaaattaatttgaggcaatattgccaaaaaacgcttttcagaaatgtctaacatattatttatttcttttacctactaactgcggtagaaatttattaaaaactaatgcaatacaagaacaaaccagaatactataaatcaacttgataataactaaaatccatgtctctggagtaataaatcccaacttagataatataatatcgaaaggtctgagtgtatcatagtgaaaaacataaaacacaattgtattctgtccaataaaactgataatagaagggaaatgtatgatatgtttaaatacgtgaaagattgcaagattaccagttattattaatgaaaaacacatcggtatagaaaaaaagaaatttttatgaacatccattggaattatcccataacaagaaatggggaggggtaaaatatttaatattgtcgttaacattatactaatatagaacaaagtacaaactgaagaggtttttttaatatcaacatttttaatatcaacatttttaattaaaagccctattaataagaataactggcatataaatgctgtacttatattaagattgtcaaaaaaagagtagtccttaagaataaagcctatcattaaaagaataatagaatatatagaaataagttttaaacttttctttgataacttcagattgtaaaaaaataaaatctcggctataatgcaacaagggaaataccataaatttgagcctgtaaaaagatttgatgaatattctaaaaaatattcaaacgacctattgattaaagcattaatagatccttttaaaaaggccaaacaaagccaaggaaaaacaagatatttaaataatttagtatagaataatttctgattcccttcacaatcattaaatacatatcctgttatcgaaaaaaacaaaggaatcattattggtgctgtaattaaactgaacaaccattgtgaattgattccattgctaatatgccaagtcattacaatcaacatagctaaagctctaagaccgtctatccattcttttcgagagttcattattttaaagtattaagtcgattaaaatttggatataagaattttactaacaccaaaggccagaagttcaaagcgagtacggtttccatattaacgaatgacaacattagaatattggcaaaaaagaacacataggtagattctgctcttttagatttcaaaattaccattttttcaaagatatgttgagcataataaccatataaaaaagaaagtaaaacaataccaataataccaccatcacaataaaattggaaaaaacaagtggcaaatgaattataattcttttcgggagatatacgaagaagatgtgaatgtaaaaactctaagtaggtattagcatcattcaacacgctaggagaatccatacctaaaaatttaagtatgccaaaaaatggtgcgaaaaaacctcttaaagcactgaaaccaaaagtgtaatcatctattccggccctatgaatgctactaccaaaaaactgaacacttgctccgtaatattgagtaagagtttggaggaaacttgaattatcttgtccatcagctgcaatactacgctgacttgacacaaaaataaataaggaaataaacaatggtactaaaagtaaagcatattttctagatttatggaattttatcctcaaatccgcaactacgcgcctaatatgatacagaagcgaaaagaatctgcatcgttagtaaaaagggggcacagtgcatcgaatgtcaccataaagacatataaatgccccttaccccaccatgcgacttgaggcaatacgcaaaatcacgactataagttgtcggtgttatccaaagtcattctggaacacattggcataagcattgttgcatgaatagatattcagcacatacttccttgatgtcctgacccatttggctggcacagagatgaacttaaagacaaacgtcttgatgcggcttgttgctttgagtccgaacctcttcacgtcaagcctcgccatgatgaatttatagaagttgcgtatgagtgccataagcagaagaaacaccgtgttttctcccataaaggattttggaagcctgttccagccgaatccgttattcatatcatcgaagatgcgttccttccctccacggaggttatagaattcgacaatctctttctcggaagactcgtagtcatttgtaaggatgcagcggtaggtgtattctccttcccacaggtcgagttcgccgtctatccgcttctgtctttgaatcacaagacggtatgccttccctttccatttctcgatgagaatggaggccagctcaaactcaatgccgcccaattccactttcttccaacctctgagggcaaagatgtcattgtagagcgaactgcatcggttagcacggatatagaaggtcttgcagtgtttagcaatctcttccactatctcttcagaacacgagccgcaatcagctctgaaacggttgataataagcttgttttgttcaaacctttcaaagaacctcttcagcgtgtccttctggtggaaacggacatttgtgttgccgtcgctgttctcaatgccgacaatcaagttgccaataaccgccacgccagggcgataaccaaggaacttcttgtatgtaggcttcgcatcaaacttctcagcctctatgaactggtggtcgaagtcaacgtcatacccctcgccctctttcagctgccctgtggacaataggcaattgaggagcagtgtattcagcttgtctgccgtgttgaagtcgtaggtcttgccagtgtcggatgtgtaggaaatgttatcctgggtcagttcctttatggctctaagaatcgtgtcggcactgcatgtgcgaagtgtcggatgaagcgaaaggtggtacatcagatgagtggtgacatcctcgatgcatgagccgccacaaaaataaacgctcataagcgaacggatgatttcgctgtattgataaccatacagcctgcatctcataccgagggttgagtcgattacagatgagagtctggagtcaaattgctccattattgaaaatattcctccaaaaggagtgagtttctcggatttaattgctacctttgccatgtctgtcgggtttgatacatattttgatttgcaacactaagataggtgaaaaatctgacatggcaaattcctgagcaactttttgttgctcaggtacttaaaaagttatatttgtaatagtgttgcggaattaaggtttataagtaaatcagatgaaaaatacctaaaatcctttctatgcatatagacacatagaataatcattagtacaaatacagttaaatatgtacgtcttgcatcaagagcaacacacaaaagagctaaagaaatagcaacaataagatatttatttttataagtactaaaaaattcaacaagagaaactggaactaacaaatataataacggatatccaatatagctttctaacaataattgagaactatttttagttaactcatttgttgcaccatcagttgcagctgctgcaactacatatacatcaccaatagtaccccctgacaaaacaaacatcaatatattgataatacttactgaaagtacagaaagacatataaagagcatactccaatatatctttgtttttaatagatcactagtattaataggcttaccggtacgataaaaagcaaattttgtagagtactttttattagctactgtaccaaaaataaatgataaaactcctagagaaattagcaaataagcttctgttgaagcttggtacataccataccaacccgatgtagcaaaaataaaaattataacgaataaaaaagtaaaagatacagcaggactaaagaatgttttgtccctgctatataacgataatcctataattagaaaaaagaaaatacagaaataactcatatattcctaagaaaagaaattaatatactttttaataatggtttctatactataacgactagatgtaagttcaacaattttggattcgtcaaatttggtcccgagaaattcatgtaaaccattttggaaatcttctttatttgtaaaatcacatgccagcccgtttgaaccatttataataatttcatttattccacccttacatgaattagaaaaaacaggctttcctaaagagtttgcttctaaaacaatatttggaaaaccttcatatcttgaactcaatagaagagcatcagcatatctaatgtaagaagaaacattctttcgatatccaataaacctaacataatcagataatcctttgctaattaccaattgcttcaaatcattttctagctcaccagaaccaagaatcaatagattaaaatttagatttgatttcatctctgacattctttctatgattatatcatatcccttttgataagctaatcttcctgcagcaataaaagtataaatatgtttgtctaataattcttgagggcaatctccaacactattatttactgaattaatgtcaactggattattaatcaccatcatcttatctttgtcacatctccaatttgtagaaaggtcgtcaaacatatcttttgattgagctatgatataatcatacttacgatatgcaatacggttaattattgttcttaatctagattcactggcatgaaataatgacgggattattgtatctctgagtaatatctttattccaaataaatgaaaaacaaaatttattagacttaaccataataattggtgaaaaccaaaaaggcaaaaatcagctttgctatttaatacattattaagaattttataaaacgatgaccataacttaccttgaacttccaagcaagaaacctcaacatcgtcatctaacatgcttttagagtcctcggaaatatttctaaagaacagaagtttaacccttaccttattagatttggtaaggttgtttgcaagatatgtaataaaacgacttgtaccatctctacctagagtacttgcaacaatcaataatgtaaccatatattgttaaatgatttctttgttaataataaacctcatcttccaaaccctgtaaattagttctgaagaataagatactaatgaaattgtaatgaaagtcataattgtattcatattgccagttagaaaagcaagcaataaacatataacgtagactgatgtcgtaactaaaatactataaaacatatatcgattatagccaaatgccacgaaaagattattagatatgacataacttactgataaaattaaaggaccaattagaaacagacgtatcggcaacaaatcacactcttcatgcaagaaaaaaagaataatttcatgtaagaaaatatttataatgataacaattacacctgtaagtataaaactaaaaacaataattttcttaaattgtattatactcctattttttgcaagtcttgggaacataactgtacatatgagcatatatggttttgccacgataccatgaagttttaaacctagatcataaataacaacatctgacatgccaacaaaagtaccaactagtaaataacttaatttgtcttttattgcgcatattatatctgttgcaaaaattgaggatgagtccttaatatacaaaattgaagacttaagattaggacagactaatttaatcttcattttgaagacaattagataaagtgagataaatccgcctacgaaataaccaaaagaatagattatgggaactaaaaaagcatcttcttgcttcttgacaacaacaaaaatcaacattaccattacaacttttgtagttacattaacaatagtgataattttcatcctctccaatccctgaaaaaaaaactggggaaacaataaatcgttcgtacagaaggcatatgtcaatataaaaatcaaaaatttacttctgtatgatggaacaatatatgcaacaaaggaatatataaaaaagaaaattatgaaaatgacaagtcttacaaacaaaacattactcaaaatctctgataacttggctttattatctctattaatagaaacgtgttttgcacaaacaaaatttgaaccaaaatcaataaagagagaagcataactagccaacatctgggcagttaatacaataccatatatttccttacctagaacatctaccaaataaggatatgtaattaaaggatataataatagaaatacttgtaaaaatgcaagatatgaaaaattctctattaataccttgtgagacttacttctttttactatattttttaacctactcatgattatcttccagaaaaaatgcttcttaataattcattcctatgaataacatagcttaaaaaaactcctcctataattataattgtaattgtcaaaagataagtaagcaactcacaacctagtaaagaagagaatatattgataaacaattgaggcaaaagcaatgtcaataaaccatgatatgcataaattataaaactagaatcgcttaataaatcaggaactaatttacctttatatttagaagcaagataatatgaaataccaattaccgaagatattttaaatatagataaatacttatataaatgaatatgtaacaattgaaaacaataatgatcacaaataatagatgtaatacatacaagcaaagaaagaaataaaatccttttacatatttgcataaaattaattctttctatagcgaaatatacacctaaatcaaaccaaaataaagactcaataacaggactttgaaagtaataatttagacagaaaagaatagctggcaagaaaattttgagtctctttattccataataaaataatggggttgatacaaccataactattaaatttctaataaaccataatgggccatcaattggtttaataaaaacttcatacacaaatgagaaccaagaaaaatcattatcgaagagtttagattcgtctcttaatacaatattgtcaggccctattaatatatataaaagaaagtataataaacaccaacacaaataaggaataaatagcgatttgactctagtaacaagcttattcttatataccgacaatgtaaattccttaatattgtagaaaaataaaaagccactaataataaaaaaaataggaacagccgaatacgctaaatagcgagaaaaaaaccaggatatacttgtataaattggtgcattttgctcgatatctaaaattcctaacctataaattggttttgctaataaatcagaatgtagtattacaactaatacacatagtgggaagcgaataaaagatattgttctggacaacagtttattctcttcttcattatataaatatatactatctttcattacaagaattacaaacaattaaaaagtatcctgtatctaatacacaaatctttaacaaaatttcctgtacaatatgaaggagagaagaaaaggaaaagacgagaaataatattcgttctataatttgcgatatttctagcaattttatatttatctgataaagtattttcaaaagatacttgtaaaagttgaattgctaaaaattcaaaatcatgacctaaattgcccttaaaaggtcggtataatcttgatctcaataagcctaaacctgtagttttatgaccactgagatttgagttgtgctgacgatattgtatatgagctgaactatcgtaaaaaacattccccataaaagaacaaataatataaatccaattatcatgaaaacttttattgttgaccttacaataaattgaaagtgcactctgattaaaaacacatgtacacccataagtgaatatttgaactagtgatagtttattatcaatatccacttctttctcattataaaaatctctaatataacttagagtatcgtcaaccattcttaaatttgaaaaatacaaattaggtactaagtgatcaaacttttctaaagattgtattgcaatagacaatttatcgttatcccaaacatcatcctgatcgcaaaatgcataataatctgttaaatcctgttgtaatgaatattggcacaacttgttaaaactttcttctgctccacaattatcttcaaaaagcaattgaatattagaatatgtttgtgcataatttcttaagatttgacgcgtaccatcacttgacccatcatctctcactataattttcatatcaacacctacctgtgatatcagactatctaactgtttacttagatatttctgaccattataggttgaaacaagtactgtaactgttttcatttcgattattattcaaaatggacgagtttctactccaagagcaattaattgatttattactcttgaatgtgtggaaaagagtagaaaactcgtaagcactcactgtatagctataatacctttgacggtattgtaacccatattgagttatatttttgattaataattaagttatttgataatattcattggcagaagtgctatgtaatcggtttcgccggatattaattttcgtaaaacatccgcaatatatttaacacgacgaagcccgtttatcttacaataattcacgattgaaataccattcttagctccaactctttgataccgttcaaagagatccttaaaatccatactacttgccatattcctttttttaaaattgtggaacaaaggtaaagagacaagatgaggaaaactaaaaaggtattgagtgcttacatagcagtgtcgctatgctcagccccacatagcccgtaccggctacggcgaccttaatgtttttaaaatcacgcatattttgtttgatttaattatttttcacctccatgcttctctccatatccgtaaccataaccgtaacgttttccataaccataatacttgccatattttccatagccatagtaataaccatacttcctactgttcagatccaaaccattgacagcaatacagagattaggcaatttgttattttcagccaattcattaatcaaagtaaactctgccttatgggtataatcagcacgacatacatatacggataaatctgcgacacgtcctataagtaaagtatcggttaccatacccaccggtgctgtatccaatatcacataatcaaaattcgccttcaatgtttcaatggctttctctaaccctccacgagccaataattctgttggattaggtggaactgtaccaccgggaagaataaacagattcttgtttatatcagaaggctgcacaaaatccattaaattcgcagttgtgtttgtcagatattgagtaataccatgttcctttttaggtatattgaagactttattcaaccccggtttacgaatatccagtcctactatcaccactttcttccctaataaagaaagactaattgctaaattagcagatatgaaagacttaccttcaccactgatagtagaagttaccagaattacattcttaccattctcaagcataaactggagattagtacggacattccggaaagtctcactcatcagattattctgattctcaaataccgctatagaaccagtcttttcatctgctaacggaatatcaccaacaacaggaagtgaagtcaatttctcaacgtcagcacgaccttcaatcttgaattttgtcaaacctatcagataaataactcctaccggaagtcccacacctaagactaaagcaaccaaataaactatcgtcttcttgggagaaatcggattgtcatctgctaacgcttcatcaataatcttcacgttattggcagtagccgccaaagtgatggcattctcctcacgtttttgaagcaacatcagatacaaccccgatttaatctcttgctggcgggcaatgctcacaaattggcgttcctgagtgggcgcatcattgatacggcgggaataacggcttgcttcacgagccagatcttctttggtaatctgcaatcctttcaatgtagcatctaaggtagcttgcacattggttctcattgcacgaatactggtatccagattgattatggtcggattattctccgtcgaagtacgcaacagacgtttcctttcaaccagcatttgattataacggtctatcgcaccggctgatgctgcatcctgtaagccgatattactcggtaatacttcatattcattacctttcatatagcgttgcaagtccatcaccagatttatctgagtctgattttccacgcgtttcttttcatattctgcattgcctgtcaaggctatctgtgcttcactgctcaaatcagtaatccccgcactacgtttgaagttctccaaatcctgttctgtactgcctaattctttagaaataataccaatacgttcgtcaataaattcagcagttttctgagccacctcattcttgtcattattggcattgatattatacatttcaagcagtttattgatataatctctaccacgccgggtatttgtattttccaatgaaataacaactacagaagtagtctttgaagtgggggctattgacaaagagttaacatatcctttcgacacagaaaaaggcctgttaatgaaagctgtgatatgacgttctttggttatattttccggacgaactgctgacaaggtatcgttatttgcgaaaaaagcaaccgtaccctcatctgtcggaaatacagcaggcaatttatcaaactgtttccggtactctttttcgcctactgtaatttgtacccccaacgcacccgttggttgaagaatcatatttatttccattctacccggaagtttatccgcttcctgatgagtcagactcactaaaacaggagatgtatgataaagctctttgcttggaaattcgtcttcatccatataagtcacgaacagtcccagattgtttaccacctctctggccaaagactttgaacgaagtacttcgatttcattatctacattgctagatgaagagacgaaaccctccaatcccatcttttctaaatcggaagacatacttgcaccaccacctttcttttcgtctttaataaggacagtggcagaaatattatatataggtgttgtcagacgtaggtatccccatgcacaagcaatacaaataattatcgatactacaaaccaaggccagtgaatcagataacggaaaagaagttcctgaatattaacctgttcttcagactgttcccctaatttatcttttctttcatcaatcatacaatgctattatctgaaaattgttactaataaacttgccaatgacactaaaatagaggtagcggagaaccagaggcttgtactgttaccaatatccgagttgcgtgcttttgccttgttcggagtcacataaacgatatcgttctgctgcaaccaataatagggagaaagaatggtctccgcactgttcaaatccagtgttataatttcctgtttgccatcagcactttcacgaatcagctttacattgtcgcgaactccccaaaccgtcatgtcacccgccatagcaagcgcttccaacaaattcactttctcgttactgatagtaaaagttcccggacgggcaacctcacccaatacggagattttatagtttaccatacggacagtgactatcggcgtttctttgatataaggtttcagtttctccacaatcagttgctccgcctctttcttggtcaagccacctaccctcaactcacctagtaccggaaaatttatttttccatcgttatctacgagatattgctgcaatatcggttgggaggttgtactggttatagctacattattttgagtagctaccgtgaggttaaacggaacagccaattccgggctggtacatgacactacaatagtaagcagatctttaggcattatctttgcatcatatagattttcctgttgagcagtctgttctacaacttttgcatcttgtaaataaggaactttcttatacgactggcaggaagcgaacagcaatatcgcaactaaacagggaaatacccccctcccctttctacttactctacttgcacaaatacaaaacaaattatacataaatttctcaagtttattattctttatccagtacctcaaatttcgaattcttcgatttgaactccggaacaacttttttcatcaatctgaccgtgtctataatccgcacagcacgggacaacttctcaaactccgcatatatatcaagaatatcagcatattcataccgacgtactttagctatcataatttttttattctcggtaggaatcgtattttctttatcactcagcacttcttcatagagtttctcacccggtcgcaagccagtaaattcaatctttatatcttcatccgggcgataacccgccaattcaatcatacgggtagccaagtcgacaatcttaacggccttgcccatttcaaagacaaagatttcattaccctctcccattgtaacagcctccataaccaaacgacaagcttcgggaatcgtcataaaaaaacgaataatatcagggtgagtcactgtgacaggaccaccgttctcaatctgttccttgaagcgcgggattacagaaccgttactgcctaatacgtttccaaaacgtgtagtaatgaatttagtatgcctcaaatccgcaactacgcgcctaatatgatacagaagcgaaaagaatctgcatcgttagtaaaaagggggcacagtgcatcgaatgtcaccataaagacatataaatgccccttaccccaccatgcgacttgaggcaatacgcaaaatcacgactataagttgtcggtgttatccaaagtcattctggaacacattggcataagcattgttgcatgaatagatattcagcacatacttccttgatgtcctgacccatttggctggcacagagatgaacttaaagacaaacgtcttgatgcggcttgttgctttgagtccgaacctcttcacgtcaagcctcgccatgatgaatttatagaagttgcgtatgagtgccataagcagaagaaacaccgtgttttctcccataaaggattttggaagcctgttccagccgaatccgttattcatatcatcgaagatgcgttccttccctccacggaggttatagaattcgacaatctctttctcggaagactcgtagtcatttgtaaggatgcagcggtaggtgtattctccttcccacaggtcgagttcgccgtctatccgcttctgtctttgaatcacaagacggtatgccttccctttccatttctcgatgagaatggaggccagctcaaactcaatgccgcccaattccactttcttccaacctctgagggcaaagatgtcattgtagagcgaactgcatcggttagcacggatatagaaggtcttgcagtgtttagcaatctcttccactatctcttcagaacacgagccgcaatcagctctgaaacggttgataataagcttgttttgttcaaacctttcaaagaacctcttcagcgtgtccttctggtggaaacggacatttgtgttgccgtcgctgttctcaatgccgacaatcaagttgccaataaccgccacgccagggcgataaccaaggaacttcttgtatgtaggcttcgcatcaaacttctcagcctctatgaactggtggtcgaagtcaacgtcatacccctcgccctctttcagctgccctgtggacaataggcaattgaggagcagtgtattcagcttgtctgccgtgttgaagtcgtaggtcttgccagtgtcggatgtgtaggaaatgttatcctgggtcagttcctttatggctctaagaatcgtgtcggcactgcatgtgcgaagtgtcggatgaagcgaaaggtggtacatcagatgagtggtgacatcctcgatgcatgagccgccacaaaaataaacgctcataagcgaacggatgatttcgctgtattgataaccatacagcctgcatctcataccgagggttgagtcgattacagatgagagtctggagtcaaattgctccattattgaaaatattcctccaaaaggagtgagtttctcggatttaattgctacctttgccatgtctgtcgggtttgatacatattttgatttgcaacactaagataggtgaaaaatctgacatggcaaattcctgagcaactttttgttgctcaggtacttaaaaagttatatttgtaatagtgttgcggaattaagggtatgtccttttatctttccctcacggatagcacaccccaagctctgtacatagatttccgccaaacgtttggaacatcccatcacattagtcgggttcacagctttgtcggtagaaaccattatcattttttctgcaccatactccaccgccatatcggcgacctgacgcgaacccgtgacattgacaagtacagcttcgcaaggattttcttccattaaaggaacatgtttataagcagcggcgtggaagacaatttgaggatgataaagttcgaataccatacgcacacgttctttcacacgtacatcaccaatcaccggaacaaaatcgatagcaggataatttttctcaaattccaaacggacattatgcaaaggagtctctgcagaatcaaacatgatgagtttttgaatacccatttgcaccaattgacggcaaagctcgctaccgatactacctgcagcaccggtcactaatacaacttttcctctgaattcttctgcgacctgactaaggtttatattgatttcagcacgtcccaataaatcttcaattttaataggacgtatccactgatgaaagttcccgtcagaatccgcttcactgatagtaggagcaataaaagtcttgacagcattacttttacaatactctaaaaggcggttctcctccaagcgggtatcttcataacgagcaaataaaatgccatgaataccatgtttttttatgacataattaaagtcttcttctgtttcaaaataataaataggaagatctgccaatcgacgtctacgattatttttaccataaatataaaaacctacaaccttataatgcgcactatcacgaagacgaagttttaaggctacacttttttcatcaatcccataaataagaatacgagtattctttttatttacccaatccaataaaaaatcatatatgattataagagatacacgaaaaacagttaatgttaccagagttaataaaccatcaaacaaaagataagatatcctataattatccggtaattcagtctcatagattacccaatatgcaataaccgacaaacaggctatcttgaataatacggcacacataatacgccataactctcgtgcttgagaaaaacggatcgtatttcgataagtatggaataataaggctcctgcaacacttgacaccaaagacacgcaaataaatttgcaaagtatccagtcactcatcgggacgtatgccatgtagtgaattacagcataggcgagtaatgaacataaaacagacagtgctgtgtcaatcccaagaatagcccaatagctgaaatagtttttacgagcatattgtactatgcccttcaatgttttttccattgtagtataaatgaataaaataatgtatcagaaatacaagtacatattcaaaatctaaccggttctacataccctaccggcatatcagcacaagcacatcctaacatattaagcctaacagctatcttgcttttgccgtctactgtaacaagttcacccacaagtccggttaaaggacctttaatgacgcgaactttttcaccacgtgccaagggagcactgttcatggaaatgacatcttttgaataatcaagcataaatcggaaacgagccatctgctcatcaggaatgatagtcggactgctctcacctcgcattaccatataccgacttactgtagaaaaggaaagaacttctttacgttcttttgcatcaacgtgtacgaataccatcattggaagcaatacagactcgaccatcttgcgtcggtcactccattgatgaagttcctgctgaaccggaacgaaattctcaatccccattttatttaaacgctcggctactttcttctcgtgatgcatgcgaaccaaagcgacataccaacgttttgagtatgctacgccttcccctgtcccattactaggcccagcatttgctgatttttgtttcgttaaaatcatatttttttaccccatgtatatctgttacttcttaggtaacaggcagtatatacacaagacacacacaacaatgaaaaagggaaattacactgatatacagggtgtaaaagaagggggcctgatattcaacgagaagatttcttgatttcgggcaataaaaaatcattgagcatgaaaaaagagatttcatgttcaaatacttttttgccctatgtttcagataaaacgaaaaaaaatgggaaaatatttgtttactatcttaaaatatgtctatctttgcgtcaaatttaattctgttacctaagaagtaacagatacactttaattctgattattaactcattacatctttttatttacctacataacaattctttatgtaagataaattccctttatttacctctgtacgttctttaagctcgaagcctttcaggtagatttgtgtggtttttatagatttgtgtcccgaagttacgaaaagagtgtaatttattggaaatgagcattgggtaatcgctcataatagtaataggttacgaattagttagttatctactgcattattcttctgtgcgttgcgtaaccttcaaagaactcttcgtatgcaaaagtaacaataaaacgggagatttagaaatgaatctcctgattttttcttctcacacaagtttttccgtaaaagcgattttatccgtcagcacaccatcgcccaaaaagattttgaacgaacgtgtgccgactgccgcataagcggagaaaagggctttgcctcacgcctaaacaatagtttagactgatgagacaaggcccctttcttttgtgcttatgccaaagaggtgcttttacggggttttgacgatttttcttttttcgttgtccttttgagccggaagcggaaagccgtgtatgaccgcacattccataaatggaacaagccgtcactcacggcagacaaaccgggaagaatgattttatccatccgaccaaacacgtttggccaaacagataaaaacatacttccttgccgatggtttgcccggtttcacgctaccggctatgttcttttctgttggggatgtctttttcacggatttctcttttgaagttttcctgtctaatctgcctctacttccgtttacctccattttcgcgcctttcagtgagccgcatcaggcagtcattttcgtgctgggtgcaaaggtaactccgggattgtacgggaaagcaaggtcaagcctcctgttttctggaaaaatctccagcccttcgggtagtattttcccgaaaaaccttgcattccctaatccctacctttttaagcacccgaaacgaaaacgaccgatgcgacagaaagacgcattaaaaaaaatgtcggataaacgagaggcagataagatagtttgaaactcaactccctcagctcttgaatccgcattaaaaaacaaaaaatcaaaaacaaaacggatatgagaacggcaatagcaacaaaattcgtggcatgggaagtaccaagtttggagaacctgcaaggcagcaaggtgtacggacttcgcaccaaactgaacaatggtgagaaattgagccgagaggaaaaggattggcttacacgcaatgtgaacagcaacacctatttcaagagcgcagtacccttgcaaggttggatgtttgacttttccgacattctccgaacctacattgtaaagcagtatggacattgggcggaatacaaggctaccgacaagaccgcactccgcagtttcctatacggcaggatagacagcatcgtggaacttaacaaatgatacggctatgacagcaacggtaaatttcagacaaatggcgcaatacatagggcttgcgatatgcaccctaatcatgcgcaccgccttttgggtgtccggcatcctttggtacatcgtcagagagataataaacggagtgttccgagtggcaatagggttaatcgtggctattctttccgttatcctgttcttcggcttcattctttggttattcaccctttaatccctaccgacatggcaaagagaagaagcaagacagtggagcaacaatgcagatactacgaggtgggcaacatcttcgagtacatggtggaaacatacctcaacggcaatatgtccgtgttccgtggactctaccacgaactgaacaagaacgcacggaaggactttatagacttcctattgagcgaggttgagccgatttattggagggagattttgaaacatactatttgacaactcataaaaacgacagcgatatgaaaggaacagaccatttcaagagaacgatacagatgtatttggaacaacgtgcggaggaagacacgctctttgcgaagaactaccgcaatccagccaagaacattgacgattgcgtaacctacattctgaactatgtgcagaaaagcggttgtaacggcttcacggacggagagatatacggacaagcagtacactactatgacgagaacgagattgaggtgggcaagcctatccaatgccaagtggcggtgaaccacattgtggaactcacggcagaggaaaaagcagaagcacgtcagcaggcagtccgcagataccaagacgaggaactccgcaagttgcagaaccgcaccaagccgacaaaggcgaaaacagaaacccaagttcaaccctcattatttgattttggcttatgaaaccgagaaacaaatttgaaaaagcagttcttgcccaaagcaagaaactacgcccgataaccccgatacagataaattgggcattccgtaattgcgtggagcattatgcacaccgcttgccgaaaggtcgtaccacttgtatggattgcggtcatagttgggtaatgacggagcagaccgagcattgtacgtgtcccgaatgtggagcaagtttgaaagtctgcctcacctatcagcgcaaggtaagacaaaagcagtatttcacaacccttaccacaagcggagaataccaagtgctacgaatgttcttgcttgtcgtgggtatggagaaaggggttaatgccaagtcctatgcccttgaaatcgggcagtattggtggaatgaacaagggcgtaaggctgttgttgccattccacgcacattgggatgctacatcgacacgttctcattcgcttctccttttgctatccgcaatgacaatgaagcgtaccgccatatctcatattccccgatatatccaagatataaggtgttgccgacgctccgcagaaacggctttaacggcaatttccacgacattgtacccaccaaactaataccggcattattgtcggacagccgtgcggaaacgctgttgaaggcagggcaatatcccatgttgcgctactatctgtaccactctttcaatattggagagtattgggcttcaatcaagatatgtatccgcaacggctatactattgaggacggctcaatgtggcgtgacaccatagacctcctgcgtcatttcggcaaggacacaaacagcccgaaatacgtttgccctgccgacctcaaagttgaacacgacaagttggtggcaaagcgcaacctgcaaaggaaacatgagcggactgaacagcaacgcaggaaagcgattgaggacgagaaacaatatctgaaagctaagggcatattcttcggacttgcctttaccgacagccttatttgcgtcaaagtcatagagagcgtggaagaaatggcagaggaaggaaggacgatgcaccattgtgtgggcggttaccacaaacgaaaagactcccttatcctatccgccaccattgacggaaaacgaattgaaacgatagaggtgtcactaaaaacttttgaggtggtgcagtgtcgtggcgtatgcaacgagaactccgaataccacgaccgcatcatcgcccttgtgaacaagaacgccaaccttatccgccagcggatgaaagcggcataatatcgacatctaacaactaacattatggaagtaagatttgaaagcatggttttcctatgggatgataaaatccccacgatgttccttgaatttatgaacctcctcactctttgtcagagtgaggagcaattaagggctagcgtcaaagactttgccgagaaacacgaacttgacaagttcttcctttacggcttcggctctcatcatttctacctgcaccaacgctacacgagcgaccccgaaatggtgatgcaacacagagtgctgtctgtacatttctaatcatctaaataacaacgactatggcaacaaaatgacaattaacggagtaagcacctgccaatcggcaggaacggagaactacgagaaattccaaacgggtatcgacagacgcaaacgcacccttgtgcaatacgactaccgccacacggacggggaacttttctcttgtgtcaaacccacattagacgaatgtcgagccgcacgggacaagtggctaacggcaaaggaaaggaaggaggagaagcgatgaacgaagcaggctaccaaacgctgatagtcaaattcagcgaacccattacggcattggacggcatctttgacgatgccgaagcgtggggagttgataccctaaaggggtggatagacagctatgaaagcagccgtttcactgccattgacagccatacggcagtcatcacgagcgagtatagcatggaatgtctgaaagagtggctggaaaaatgcacacccataaccgagaaaacagaattttgaacattggggcggtgtccgcaccgcccgaaccataaacctaaaagacaacggatatgatagcaaagacaattttagagcagattggcggcagacgctttgccgccatgacgggaagcaaagacttcacagacatgggcaacggcttgcgcatgagccttgcgaggaacaagaccagtgccaaccgccttgacatcatctatgacggaggggcagacctatacaatatgcgtttctaccgcaagacgttcagcaaaaagacattcgagagcaggacgaaggacattgaaacgcacgaggggatatattgcgatatgctggaggaaatgttcacgatggtaacgggactttacacccgcttttgaggggtgggcggcaaaagccgcctactttctttcatgagcatgatggcggataagaaagtaggcaaagaaacctttgtaccaatctacgatagtattcacaaaaacaagttttaatcatggaaacaatcagacagaacggaaaaaccatcttgtacagcaacgacggcataagcataaagatggttttcaagaaccttacgggcaggaattttcaaggtcaggaatatacagactatatccggcatatcgcaatcggcagcatgggattttcacccggtatcatagagcattgcagggacggcgaggttgcaggcaaagggacaatcccgaatgtatgaaaactgaaactccgatgaagttggcggcttcatcggagtttctttcgtcagacacttattctttatggtacatacagcagcgcaaactcagccttccttcgtttgagcagcatggcgtggcgtttccccttatagttacagaaagcgatatactcccggtagatgttcctgtcacccgcctccagctttcggattagcgtgcttttgggtatcttcccactccccaaaagacggtacggaccgacattgtaggcgagcgtggcaagcagaagcgaatccttcccgaactgctggaacatcgcgcagaacttccgcaggtcttttcgcagaagcgcgtccgcctgccgcttcgtcatggtgcgtgccgaatatctttcccccggctgcaaccgatgtccatatcctacatacgggtgatgtttttccgaatgccagccctcaaaatacttcgtgcatcgcaccgctctctcaaatggtggcagccggtagatagccgcctgcccgtccgttccctcatggcgtctgttccgtgcggacacggaacagaccgccagaagcgaacagaggatagccatgaatacacgcatcatcgtgtaaggggcttgaagttcccgatggggacaacagtgataaccccgtcatccttcacgtttcggttgttgaagtcaaattccaactcataggagttgccgaaattgtcctccactaccacgatgaagttgtgcgcctcgtcaccttgcgccgtgtagtacagccggaacttctcgttttcgagcaggtagcggtcattgggcaggaaagtgatgccgttgtccattttcagtgtgccctcaccctcgaactggaaataccggatggtatagagggtattggcgaaatcgcccgttttcttcagctcacagcggatttccaccgtctgcccctttgtgaccttgttcggcacgggcatggtttccaccgtgaagggataggattgctggatgtccatatcgtcgtcgcacgatacgaatgtgaatgacactgcggcgaacaggcagagtgccaacgccttgaagattgatgttctcttgttcttgttgttcagtatgttcattattctttgatttttagattgttgttcttttgttgttttcttgatacttgttgcaggtactcgttcaagtccttgcagccttgatagatgccggaacggtctgtcacctttcctccgtagcgtgtccgcagggcttccattgccctgcgtccggcttcgtctcggtcgaggtaacagtcgatgcgctcgtacccgtccagatgtttcaaagccttttccacgttggcgacggagttcagcacaaggcagtcacccgttgccaaaccgagcgtgacggcggacaggaagtccataaagccctcgaacacgctgcacacgtccgccgggatgtcccccgccttgaccagcgacacgtcctttggtggtacgcaacccttgaaacggcggcttcgggtttcatagccgcccgacacgttcggaaagccgacggcaaagtaccgcttaccacgcacgccgtagttcaggcggcagcagtggcgggatgcaacggcataagggatgcctctttccttcaaatactccgtcagcggagagcggagcagcgggacggcttccactccctcaaaggcaggttcggacggttccggcaggtacaacggcttttctgctgcggcaagcggcatacgggcggtttccgctatgaatctcgcctgcgccatgaaatccccgcttcgggtaaactccccgacaagcgtgaagatgtcgccgcccttgcccaagccgaagtcgtaccagagctgtttcgccacgttcacacggaaggagggcgtgcgttcactgcggtatggcgcacgataccacagctcgtttccgctccttcggacaggctcatgtcccagccgtgcgagaaagtccgcaatgggtatctgcctcatattctcaatgtccgtccgttccatgcgacgtgtcagttgatgattatcttgacgcccgccccgaactgcgtatggaacttccgtgtgtcgccaccccacagcaggcgctcccggaggttggcgagcagggcgatacggtcagccacgtaaaactccacatcgagcgtcagcgcaccgccgtagatgaaggcgtcccggtcatggagcgtggagccgtcatgcagcactttctcgccccaattcaccgactcatatccggcgagagccgaagcccccgcatagacgaacactattttacgggcgtcggagagtatcttgaaataataaccgccctccgccgtgaactgcgccacaggtatggcggtatccttgtacgggttgttcttcaagaggtattcgccaccgaacacccacttgttaccgttcttcgtgtaggtggagagagccgccccgaaactgtaaccgccattgttgccacttaaacgcataccgtccacaaggttagctctcaattcgatgccctgcatcttcggcaggcaccgctgggcgtgcgcctgccccgtgaagagggcaagcgacgcgatgatgattgcgatgtgctttctcatggtcagcgcacttgaagttcgttgatggtacccgcacgtaccaagtcctcgttctcaatcacgaaggactgatgacggcctccgttcttctcgttcagctccaccacgaggcacttgccgtcggggatggtgaacttcgccatcgtgaataccgtgcgctcgctctttctgcccggcacacaggtggcatagttctgcgcacggagcggcaggatgatctgctcctgcacggcggtacgcttcgccaccttcttgtccacgattttccacgtgatatagtccacatcgaaaggcacgttgctttggttcctgatttccgtgtggaaatagagaagtccgttgtgcgtgtagatgcctttcagaaggtactggatgccgaaacgcttgcagccgatgtgtttcacctcacgcttgttctgcttgtaaatggacttcatgataaggcgcaccagcatgggactttcgctacccagctctttcagatagatttcctgcgcgttgttcggacggttcaccgcctcgccgtcatggatgaagtcgcacatctccacgttgagcagcagcggttcggcggcgtacttcacgttgaaggtgtagaaactcccgtcctccgttatcacggacatattggtttcgttcgggaagttcctcacggtcgctttcacgcggatgacgttctccgctccgtcggctttacccgcaatcaggtcgggcgagcctaaatcgacgtagcgcacctccgaggggaaaatgacgtggacggtcttgtcgtaggtcacttccaagccgtgcgggggaaccatgcggtcgaaggtcagcttctttgtcagcccgtgatacagatcgccgtccgcctccttctgcggatagacctcctttgtcaaggtcggttgttcacttccgttgtccgttacaacggttacgttctcctgcgcgttggcagttacgatgcccatagcgagggcaaacatgatgattacttttttcattctactttggattttagtggtaaataaaaatttggttgttgtttttttagtcgttgattgttattgttttcaatctctgtcctgatatagcatgaccttgtatccggatttcagatgcaccttgacggtacgcatcttcttggcgatatactggctcgtgccttgtatcagccccttgcccaagtcggaggcgagctgcgcccctgcgttggtggagatattaatgctgctgcccagcgagccgcccatgttggcggcaacctccctgacggcgttcatctccatcgagtttggaatgaagatgccgggctgtccgtccgtgtcatacaccgccagttctaccggtataatcgtacctgcgtactccagcgaagtaatttcaatatcgagtcgttcgccctgaatctttgccgtgcctaccaccactgcattgcggggtatgattttgtccgccactgccatcggctccagcagccgtaatcttaccgcctgcccgtcagtcacactctgcgccccatagacacacgccgatatggtgttcctgtccgatacagtcgtgacacccaccgccgtattgaaactgcggttgcgctcctgcgagaaggaggcgacaaactcagcgttgctcatcggctgtgagagcgaagataccacctgatgcgttacctgcctgacaggtgcagccgtgttctttccggctttctgcacatggtaaggttctgccgcctgtccgacaggtggctgtgtaccgttctgaccgcccatgtacttcgccgccagctcgtaggacttttccatgagtgccacttgatcatccatagaggatgccttgcctttctcggtttccagttccgattccagcgaggcgatacgctccaacagttcgtccatttccgcgttgtcgttcttcggctgctcatagaagttgccgagcgtggtattgaggtcgcggtaggcagctgcggaggattggatggttttcggagcggatgattttgctgttgcatcttccgcatttccgggattagcaaggtcgaagtccctgccgccgtccgtttccgccacctcgcggtcgaacatatcgcccagttcctgcatggcgcggctgcggttctcctgccgttcctccattgctccctgttcgtaggctttcgccttgtcgccgatgatctggcggttcgccttgtcagcgtcgggcatttcgatgttgtaaccacccgttcccggttgctgctccttgtcggaagacggggcgaatatcagccacatagcaccgatgaataccagcactatagcgggcagcactatcattttctgacgtttcagcctttgggcttcggtcagcggcttgcgctccttcttcggtttcccgttgtcgggagccgccttgttctcgtttttaggttcattcttcgtctgttccatataaataaggtattacattatgattgttgtccggctttatggacagttccacctgtccggcatggtctgttaccatccggctgccgtcattcctgccgatttcatagacggctttgccgaaggtgtagagggcaagcaccgcaaaggcggcgagcatcgccagcacgatgcgcctgcgtgtcttcgggggcaaaccgtccagatagcctttgagccttgccaccagcattttctttttgtcgtggagcttccagtacgcacgccaaaatgattttttgattttcttcatgtccgtttaccttttgatggtttgtaaatccttgttctcgatgatggtgaatccctcgatggtgaaaccgttgggattgtcgtccgaacgggacgagttcaagaggcggcacgtagtcacgaggctgcgctcggtgacgttgctctgccggatgatcttctgcgtggcgtaggtcacggcacggtagggatagccgttgaaatcgcacaccacgctgtccaccttcaacacctgattgatgttcccggcgatgatgcggttgtagtaccccttctcggcaaagtccgaatagtagttgtacacgcttttgtccgctaatagcagggcgcgtttcacgttatgctctatcgcgctcttttcgggtgagagcgtgaagaacagctcgtggaaacggcgcacgtgttccctcgcttctgccggacggttctgcgacaagtcttgcgagagagccagcatcagcgacttgccgttgtccagcacgtaaatcttttcccgttgccgctccgcgaagcggtaggaactccacacgctccataccgttattacggcacacaacgagaggaagacgataccgaacaggcgtatctgcctgaacgatgattcgatgtttttaagtgacttaaattccattgttgtttattcgtttttaattgtcagttgattatttcagcagcttcccgacacgtccgaccacgtttcctgcggctgcgcccgccacgctgcccgccatacttccggctcgtcctgccgtctggttcacgttgcgaccgtagcttcccatgcctccggcttggataatccagcctgctaccgtggggatggtgaagtaaccaatgatgccgattatcatgaagacgatgtacaccccgtcgctcgaatccagcgagaagttcgggtcagcctgcatccgttcgatgtcgctttgcagcatcagcacttgtatcttcgccagtatggtgctgaacatatccgacacgggcagccacagatagacctgtatgtagcggcatatccactgtgtaagcgtgctttggaagccgtcccacaccgatatggcgaaggctatcggaccgagtatcgccagcaccacgaggaagaacgtgcggatggtgtctatcacgagggcggcggcttggaacatcagttccagtatctcgcggaagaagtcgcggatgcccttcttcatgttgtacatcccgcgctcgatgtacatccccgccatcgtcaccatgtcgccgggcgaccagcccagttcttccagttgtttgtcaaactcctcatttgacacgaggtaggcggtttcgggattgcgcatcatcgcttcgtactccagtttgtccttctgctcacggtatcggttcatgtccagcgtttccgcctccagcatctttgccgtaccctgcacgacgggcgacatgatgctgtttatcgtacccagtaccaccgtcggaaagaacatgatgcacagaccgatagcgaacgggcggagcatagggaacacgtctatcggttcggctctcgccagcgactgccatacccggtaggccacataaaagagtgcgcccagcccggcgatgcctttcgccacgcccgccatgtccccgcatagcggcatcatctgttcgtagagcgagcgcagaatttggtgaaggttgtcgaaattcataggctaccaatatctttcgttcatgttcccgtacagccccatgatgcggtcaaggtcgtttttcttcttcgcacgcaggtaactcacgctaatgttcttgttggtgtagtagctcacgaggttgcggtaacgcttcattttggagtagcagcgttccaccacgtccatgcgctccttgtccgtcatggagagcgtggtgatattcaccacattcttcagttccgtcagcacatcgttggattcctccaataacttggtgtagccaaaggcgatggctcccagttcctccaccgtgaagttgtcgtcacgcatcatcttctggaaactggtcacataggtgtcggtgatgtcacccaccatcaggatggtctgctgcaccttccgggcgtcctttaccagattgttcacggatttgagtgcgtcgtaatacttcttgccctgttcgtaaatcttcacggtctcttgaaaattttttatcatattctgggcggtcgtggaagtgtgtaccacgttcttcgaggtgttcacgatgctctgcgcgatgttggacgggtctatcaccgcccactgtgcgcttgccctgccgactgcaaacaggcacaggcagataataagtgttattcttgttctcatgttactttggattttagtggatttcattatttattgctcgcctatcggatggtccggtttcgggttcacacgcacgtagtccccgttcggcgagaaggtcaggatgtccgtcgcctcgttgtaggacacgtcgatgcggaatccggtgttcatgaacagattgccgttctcctcctgcaagagataggtttccggcttcagcttgcggcggatgccgctccgcttgaataccgtcaccttataggcttcgccctccttgtagataagcacgtcgggcttgccctccacgctctcccagttcccgcaaagctggtcacggcggttgtccgctacatcgcaggattgcagtaccatgaccgccagcccaattaaacacttgctgacttgcagcattttcgttcttgatatactcatacgcattttcttttttagttgatgaatcggtttttacttattcctccgtctttcggcaagttgccggatggtggcttcgatgtcgccgcccagctgctccgccagacggtaaacctctactttttccgtttcttcggtggtgtacgcgtaggctaagcacccagcgccttgtcatatttctatggtaggtttccgagtactcgcctccgaaccggacttacaagtctccctgtatccggctctccactaattaattcagtctgattcttcggtcggggtctattcttgcatgacactttgagcagacagccaaagtttttcgtcttcgagctatcattttcttttcccagtcggatttacctttcaggtctttaagtttgcgaacgtgatgcatttcgagtttatcggtagcaccgcataattcgcaaacttggagcttcagcctttccataaggctgttacgtccacctgttatggaaactgtccgtggaatagtgtcacagtaaatattccctgcaacctttttgcgtttgaaaccatcatgataaaatgattggtaaagtgtcttacccttgctattttcatatgccacttggaaaaccttgttctttttatatttcagaagtattttctttacagatgatttgtatttgttcgcaaataccttatacatgctgtatgacataatgtgatagaaagaattgatgacatagctgttattggctattgagtagtaattatagaaccctcggatttcggcattgaactgactgactatttccaagtcatccaagttcagcatgtacgttctgacgatggatttccaaacctctttgccattgacgaccgcgattcttgcggctttataatcaaagagtttcttccgcatcgtttcaaaattcaggtacaatacaggcttgtgtccgaatgcacgaaccgttttaccgtacttatccttacgtaaatcgttacacctacgtataaatacgtcatatccgagaaatttcgctggtttctgcgcattggttatcagtgtcttttcgtctgacagttccagtttaagagcttcattcaaataattcttaatatcctcttttactgttttgcagtcttcaagattaccggtaattccaatcagaaagtcatctgcgtatctcacgtattttaaccgtttgatactgctgtccatttcattacgtgccggatagttgttccgttcttctcgtagccgcttgatttcggcggtcatctgtttccttacctttacatctttctcattctttagtttctttgccagtcggtatcttcgctgttcgtagagcttgtatcgagcgtcgccttttcttgttacccctttattgaaccgattgatgtattccttgatgtacttgtcgaacttgtcaaggtagatgttagccagtattgggctgataatcccgccttgcggagttccactgtacgttctatgaaatacccagtcttccacatatccggcattcaggaattttctgataagccgcaaaaatctctcgtcggcgatacgttcccgaagaatattaatcagtacgtcatgattgatattgtcgaagaatcctttaatatcgccttcaataaaccatttcacggcagtgaatgtcttttgtatatctataagagcagtatgacaacttcgtttgggacgaaacccatgtgaagtatgttcaaaactaccttcatagattgcttcaagtatcattctgactacttcctgtaccagcttatcatcaaaagagggtatgccaagcggacgttttttcccgtttttcttaggtatgtacgtccttttggacggattaggctgataagtctcatttttaagactgccaatcagttgttcaactcggtcaatactcattccgtcaatggttttaccatcggctcctgccgtcatgttgcctgtcttgctgtaaatattctgataggctacataaaacatttcctcgttaaacagcactctatacagccgctcaaacttatagttcaagttaccgctgtgtttactcagactgttcaacacattttctggatttctcatgtctctcacatcttcctttaaattgttaaacttaattagctgctccccttcgccatgtacagggcgttaccctgctcagactactatggaagctccgttgccatgccggatattcaggggcagaccccatagccctacaactggctttccggtttaggcaatccccgtttagaaatttgacgactatttggctcgatagattgtcggatacgactttcgtcctttactacttatggtagttgccttgcggtaagtttatgctactcctgctacgtgtcatcagtgtagtaccgcaacataacggtataattccgaagaattattcaactgtcttccgtcattgcccaaggatacgactgctcggactatcgttcaaccaatgcaggctttatcctcatatctatcattttaacttgccattcggtcgcagcctgacagttggctgacttatggctttaccaacgtgctatgttcccttgtggggttttcccctccggttagcggttgttaatgggcattttaaacacttgcccagtcgcttgccaaagcgacattcgtcaaattccctttacgggcgcaccagatactcttcagcactaacttcggtggcatagaccgctgactgtgtgccacccagcccgatccagacttccttgtagagccttgacgggttgttcgccatgttgatggagagtatctgcgatttctccttctccgtcagacccagcagggactgtatggcatcaaacttgttcatgtacttccgctggtcgagaagtatcttgcagtcggagttattgatgatgctctccttgacgacgggcgaggaaatgatgtcatccacctcctgcgtcaccacgattgcctccccgtaatacttgcgcacggtcttgtacatatagcgcaggtactcagccatgttcgccgaagagagagccttccaagcctcttccactatcagttgcttgcgcacgcctttcagacggcgcatcttgttgatgaaggcttccatgataatgatggtcaccacagggaaaagttctcgattttcctttatactgtcaatctcgaagacgatgaaccgcttgccgagcaggtcgatgttctccgtggagttgagcaggaagtcgtagcgtccgccccggtaatactgccgcatggtggtgagcatattgtcgatgttgaagtctgacttctccacctttatctcacgttccgccagttcgcggcggtagtcgtcgcgcatatactcgtagaaggtattgaacgaggggacgatgttccggtctgccctgatacgctcgatgtaggcgttcaccgcactgcccagttcgccgctctccgtcttcgtcactttgtcgtcctccgatttccagagcgtcagcagcagcgtcttgatgctgtcctttttctccacgtcaaacacgtaatcatcggtgtagaacgggttgaacgaaatcggtttctcctccgtgtaggtgaagtacacgccgtccgccccgtttgtcttgcgccggatcatctcgcacaagccctgataagagtttcccgtgtccaccagcaccacatgcgtaccctgctcgtagtattgcctcacgaggtggttcataaagaaggatttgccactgcccgaagggcccaacacgaacttgttgcggttggtggtgatgccccgcttcattggcaggtcggagatgtcgaggtgcagcggttttcccgtaagcctgtccaccatcttgatgccgaagggcgagagcgagctgcggtagttggtttcctccgtgaagaggcacaccgcctgctcgatgaaggtgtggaaactctcttccgccgggaagtccgccgcgttgccgggcatcgccgcccagtagagcgtcgggcagtcgatggtgttgtggcggggtacgcactccatgctggcgagctggctgcctacatcgttcttgatatgcttcagctcctccgcgtcatcgctccatgccatgacgttgaagtgcgcccgcaccgatgtcagcccgtaggaatgggcttcgttcaggtactggtctatccactcgcggttgatgctgttgctccggctgtatcgggatagcgactgcatattccttgcggacttctcgaacttctgcaaattttcctcgctgttgtcgataatcacatattggttgtagatgtggttgcaggagagcagcagaccaacgggagaggcgaaggaaaggcggcagtcgcttcgatccgtggaaagtttctcgtagcggatgtcggtagtcacctttccgggcatatcctctgcatcggagagggtgtgcaggcacaggcggttgtcgccgatgcgcatttcccttgccgagaggttgatgtcctgcaaggtcgtgtcgccttcgggcatgagcgagaagtaacgctctatcagtccggcggacttctccgtcccgacaatctcgtcggtggagaggcgtcgtagcctgacaaagccgctgtcgttcatgatgcgctcgaactgttcggcggcctccatgaacttcccggcggtttccttgcccagttccttcgggatgatatgcccccggcacagcgtactgaagttgctctgcatccggttacgttcctttgtcgtcttggtcaggtagaggtagcaggtgtgtttcaggtacggacgctcgttgaaatggcgttcaaaggagcggctcagaaaactcatgtcgtccttctgtaactccggcttgtagcgttccttgatgaaccagtcctgcttatgcacgacgcagaagtccggtagcaccttgatagccttgcaccagcagccgtgtatcgcttcgtactccgctcccgtcacggtgtaaagctccggcagttccacctcaaaagccaccgtgatgtcggcgtctttggaaatgatgcagccatgctccacagccagcagggggaacttgttttccagtgtcgtcattttggatgtatttctcatgtcgtttcttcctttcgttgccgtttgagtaatcgggtgatccgccgtcggttgataaggtatcggggatggctccttgccgctcccaatttcatcagcccgtgttcgccgtaccgggcgttcagcgcgaaggtctgccatacgaggacggaagacgatgccgcgccgaagccgatacatatccactggtcgatgccgaccatatagaggatgacgaacaggacgaagagagccagcagacctccgcagaaaatgaagaggtactgagccttcaaacccttgaactcgaccggacggccgatacccttgtttatcgggtattcagccatacattgtttattaaaggaagaatgagcgcaggatagtggcggcgacaatcaagaagatacaagccccgaaccacgaggcggcggtcttcgaggtgtccgggtctccggacgagaattttccgtacactttcacgccaccgataagcccgactaccgcgccgatggcgtagattaatttcgtgccggggtcgaaatacgaactcaccatagaggtggcttcgttgatgccagccagaccgtttccctgtgcgaaagcggaggcggttgcggcaatcataagtgccgcagcgatgattaacttttgtctgatgttcttgttcataaactgttcttttttgtgccgtccaaagggtggatagtcctttttcgggcggttgatacttgattactttactttggttttagtggttgcccgtttgtttctacggacttggggctgtccgttgcgggttggctgtaccttgtaccgccgtgcgcgtgggtgtcgtcattttacgttttcatttccattcttttttagttgttatacatagtttcggaagtcgaactcctcgatgttgtcgggaatcacgaacaccttttccttttgttgtgtcacggtcatgttcaccgtgtccacgaaaactgccatcgcctttgcaagcctctcgctcattgcttcatcggtcaggcgttccgttattcttgtgaaaagctctgtcccgtccagttccgtcatgacctttccggcgtgtcgcatttcctcatcggatggtgattccttccgtatggtgtgtactgccatgtcaatatcctcgaagctacttcccgaagcctgctttttgtctggttcttcatcctccggttcatcttctccgtactccagttccgagggcgggatgctcgtgaaggtttcatcgagtttgtcctccggtacttgtgtcgggcgtgagacggtttccgtgtttccgtcgtcaaaagtagcctcttcctccgacagctcaatgcctttttccgaagtggcggcttcttgcgtcggtatggcagcggttgtccgggtcgatgccatcttgaaacggctcttgccaatgatgtccgaggtgtctgcgtgaggtatttccttatcctttccttgctctgccaccgtactgtccaatgaccgccacagcccggcaatatgtctgaagaaacggatgagcttcgtgtccatgatgcggtcatagaacagcagaaacagaaaccacacgttgcaagcaaccgatacgattaaaaacgcctttgtcataatcttactttttgggcgttttcaatctgttccatgtactgctgcccgtattgtcggaaatggtcgcggaggatgttatccacaaacttgccgatgctcaaaccgtttcccatccgactggtaacgatagcgactttctcatgaatttctcggctgatgtatatacattgccgcgttttgatttccgatgcttgcaggaaagtcgagagcggtttgtctctgcctttatccttgcggaagtcaacgtcggtattttcctgcccgtagtcggttacacactttgctgcacggacagcggttctttcactctttcctgtttgcagatactcagcctgacggttcttatttgttcttttcatacttctttgttgtttttgagtgtttataaattataggattccatgtgccgtttgaacgattcggctatctcgtcttggaacagcgtgaaatggtgtgtcagcacgttgtcaagaaatgccgcgatagtcacttcgttgcctccgattacatgaagcatcttctgtatgcggtcgtggtactccttgcggatatagacctgcttgccgagccttgccgtgatattggaaccgcatatgaatactgtgtcataatccaatttttccggcttgctgttcctgcgcctgcgttccggctcctctttggagtgcgaggcgggtggagaaacggcttcttgtatcgcttctttcggaggtgggacaggagcgttcccgtccgtgcttctcgcttccggcggaatgcttgtatcgtccagtcgaaatgagttgattacggcttcgctgtcgatgtcctcgattcttgttttctttgccatgccgttcagtttttgatgatgccgagaatctcatcgacgagtttgtcgaggttgctgccgcgtaccagtattttgtccgccggaaacgccgtggagcggaataccgccttgcgttctgccgccgtctccttgcggaagcgcttactgtccggtagatgtgtttccagaatgggcagggcgaactcggcacagaccttgtcgtatgccttgtaaagttcagtcttttcgcgtccgtccaccatgttccacacgaggtaaatccctttgatgccggacttgcccgtgcttatcatctgttcgttgatgacagtggcgaacttgatggaactctccatcaccacacggtcggcgatgatgggcgtgaagatatagtccatttgggaaatggtctgcaccacatcggcattgttgattgttcccggcaggtcgaagaacacgaaatcgaggtcgggctgcgctgccaccagattttcggcggtctttaccgcatcttccgcacggctgcatctgatggtgtacgggttcttcttcagtcgtttgagctgctcatacgccagcaccttgtaatgcccgtcctccatgacggctttcatgtcacgcttgcgcatgtcatggatactgtactgcgggaaatcgcagtccaccacggctacgttgtagcctttcacatagtgcagatagcttgctacaagcactgtcagggttgtcttacccgctccacctttctgcgtggagattgccacataagttgcttctttcatttttttgataatttatttggttatacatctgtccggtggcggtagcgtattgtcattagtacgtacgcacgcactcccattcatttatttattcactccttaatccggctgtgcctgcgggtattcatcggtttgtccaaccgtccatgcttttatccgtccgcacggacgtgtgcttggaaaactatctgaatacatacacctgttttcaaccgtttggattgatgcccggattgctgtccgaacatctggcggaaggagtgtattttcagtcccacatccgaatcacactgcaaataaacaaggatattttggaacttgtatcacttctccggcaagtggcagcacgttgcgccggttggcactgattgtccgggtcaagcctctgtcggacatcgccttaagggcgtaactttgcacccgaacggcagggtacgccgcaggtggcgcagcccggagtttgaaaggaatcatccccaatccgtccccgacggatttttatgttcacctgaacatagcaaggtatgttttcagccgctcaaaacattttgagcagccacgaaaacgccttgcccttgcagggggcgggcttaccctccgaagtcgggaagcctctcaaacctgcggtgctgtgcctcaaagcggcggcttatgccgtcaaaccgctaaatccaaagtaatatgagtgaaaaaagaagaaacaaaggcgggagaaatcccaaactcgacccggcggtgttccgctacaccgtccgtttcagtgaggaggaacacaaccgtttcctctccatgttcgagaagtcaggcgtaaacgccaagtcggttttcctgaaagcgcacttcttcgggcagccgttcaaggtgctgaaagtggacaagacgctggtggattactacaccaaactgtccgattttcatgcgcagttccgcgcgataggcacgaactacaaccaagtagtgaaggaactgaggctgcatttttccgagaaaaaggcgatggcgttgctttacaagttggagcaacagaccgtcgaactcgtaaaactgagccgtaagattgtggaactttcaagggagatgcaggaaaaatggtcgcaaaaatcagtgtaggaaactcgttgtatggcgcacttgcctacaacggggagaagatcaacgaggcgaaagggcggcttctgacaaccaaccgcatctacaatgacggtacgggaacgatggacatccaccgggctatggaggactttctcgctctgatgcccgtgcggtcgaaggtggagaaaccggtggtgcatatctcgctcaatccgcatcccgacgatattttgacggacacggagcttcagaacatcgcacgggagtatctggagaagatgggcttcggcaaccagccgtatctcgttttcaagcatgaggacatcgaccgccaccatctgcatatcgtgacggtcagggtggacgagaacggcaggagcatagacacccggaacaatttttaccggagcaagcagataacacgcgaactggaacggaagtacgggctgcatgacgcggaacgcaagaatcgccgtcttgacacgccgctgcgcaaggtggacgcctctgcgggcgacgtgaagaagcaggtggggaatatcgttaaggctttgaacgggcaataccgtttccaaacgatgggagaataccgtgccctcctttccttatataatatgacagtggaggaagcacatggcaatgtgcgcagacgtgagtatcacgggctggtctattccgtcacggacgacaagggcaacaaggtcggcaatcctttcaagtcctcgctgttcgggaagtccgtcggctatgaagccgtacagaagaagtttgcccgttccaagcaggagtttaaggagaggaaacttgccgacatgacgaaacgcaccgtcctttccgtgctggaaggcacgtatgacaaggagaagtttgtagccaccctcaaaggaaagggcatcgacaccgtactacgctacacggaggaagggcgcatctacggagccacgttcatcgaccaccgtacgggctgcgtgctgaacggctcacgcatgggcaaggaactttccgccaacgccttgcaggaacacttcacgcagccttacgctggacagccgtcgattccgctttccgttatggtggagggacaagaggacaaacaaggatattccggaggggaatacgagaaccattcgggtggtatgaacctgtttgcccccgaaggtccggcagtggacgccgaggaggaagctttcatccgggcgatgcagcgcaggaagaaaaagaagaagcgcaagggcttgggaatgtaatcagtcagacaaagtatcaacaatcaaaacaatttcaaggtatgtcacaacaagaagacgatttgagggcattggcgaaaaacatggattttctgcgtgccgtgagtattattttagtggtcatgaacgtgtactggttctgttatgaagccatacggctctggggtgtggacatcggtgtggtggacaggatactgatgaacttcaaccgcacggcggggctgttccgttccatcctctacacgaaactatttgccgtcctcctgcttgccctgtcctgtctggggacaaagggcgtgaagggcgagaaaatcacgtgggggaaaatctgggcggtccttgccgtgggcttcgtgctgttcttcctcaactggtggatactggccctgccattgccggtggaggcggtgacgggactgtatatcctgaccgttggtgcgggctatgtattcctgctgatgggcggtctgtggttgagccgcctgttgaagcacaacctcatggatgatgtgttcaacaacgagaacgagagcttcatgcaggaaacgcggcttatcgaaagcgagcattcggtcaatctgccgacacggttctactacaaaaagcgttggaacaacggctggatcaatgtggtgaatccttttcgtgcctccatcgtgttgggtacgccgggtagtggaaagtcatacgcggtggtaaacagtttcatcaagcagcagattgaaaagggcttttcgatgtatgtatatgacttcaaattcagcgacttatctacaatcgcctacaaccatctgctgaaccacccggagggttacaaggtgaagccgaagttttatgtgataaacttcgacgacccgcgacgctcgcaccgctgtaatcccatccacccggatttcatggaggatattacggatgcctacgagagtgcctatacgataatgctcaacctcaataaaacgtgggtgtgacctgtaaagtcacgtaattgattgttagacagtgatattaattgcatgatttaacccgctgttccgtcagcggtagcctactataaggtgcatctccagtgatgggttgtgccaagcttataggacaaagtacactttccgaaaggacaagactgaaccgtgagggaatgtcaaggacggttagtatcataccgttgagtggcgaggctggatagcatggttaacgtaagtgaactgactttagccgtcgtaaggtttgaaggagcgcaagatactttagctctcaccaaaaggtaagcagtcggataacccttgcccatgttggggttacacggacacagcactgccggcggacttggcagaacctaaactatccgtttgtcaattacgtggaacagggcaagcctgtatctctctcgtaagaatgcgagtaagcgaaccgcaaggcaagccgaatggggtgcaggtatgagataacggaaaaagcgaatgccaccctgtaatggggtggatacggattgaatcaacatcacgagttgttattggtgacatcatccgacacgaaagtgggcagacttccgtatatggtaactctttacaagataacttttagaactttcaaaaggaggaaagcaaatgaacgaaactaaaacatcgtgtgcgcctgctgatagtaggaatctaacttgggacggcatggactggtccaagtgtgaagcctatgtccgaaagctacaagcgcgtattgtaaaggctcaaaaggaaggcagacataacaaggtgaaagccttgcagtggatgctgacccactctttttacgccaaggcattggcggtaaagagggttacttccaacaaagggaagaaaacgtctggagtagataaacagctttgggattctcccaagcgcaagtacaaagcaatcggtgaactgaaacgtcgtggttacaatccgcagccgcttcgtagggttcacatcaagaaaaagaacggtaaactccgaccgttgggaataccgacaatgaaagacagggcgatgcaggcattatatctcatggcattggaaccgatagccgaaacgacaggcgaccgcttttcttatggtttccgcaagaaacgcaggacaatggacgctatccgtcagattgatacggttctaaaccgccagcattcccccgaatggattttggagggagacattaaaggctgcttcgaccatatcagccacgactggcttcttaatcatatccctatggataagacgatactcagaaaatggctgaaatgtggagctgtattcaatggcaaactattcccgacagaagagggtacaccacaaggaggtatcatatcaccgacacttgcaaatatagcacttgacggacttcaaccactcttggctgaaagattcaaaagattatggcgcaacaataagacattccactacaaggtaaaccttattcgttatgcggatgactttataatcacaggtcgagataaggagctattggaaaacgaagtcaaacctatcgtgatagaatttctcaaagaaagagggctgaccttatccgaagagaaaactaccattacgaacatatacgacggttttgatttcttaggtttcaatgtgaggaagtttggcaaaaggctatacacatccccgtccaaagatgcacagaaacgcttcagggcaaaaatcggtgacatcgttaaaggacataaaatgtgtaagcaggaatcgctgatacgaatgcttaatcctgtaatcacaggttggggcaactattaccgatatggtgcatcaaccgatgcttttcatggttgtgacaatcacatttacaatctcacgaagaaatgggctttacgtcgccatccaaagaaacgcaagtcttgggttgcagacaaatattggcatgaaattcgggggcgtaaatggacgtttgcatggaaatatgaaaccaagagcaagaaagtgaactacctgacccttaaaaggttgtcggatatacattataccccgtacaagcaaatcaaaggtgaggcaaaccctttcgacccggaatacgatgattatttctttcagcgaaaggagcaacaaatgctggaatctctcaagggacgtaagtctctcttatatttatggaacaagcagaaccggatttgtccgttatgcggcaaggaaatagattgtacaaaagcatggaacgtcaacgaaatatctgttggtggttcgattgtacggcaacttgtccacaacaactgctacaagcgaaataaacgaaaatgttgaaagtatgagccgatttctaacaacaaatagaaatattgagttgcttgagccgtatgaggggaaactctcatgtacggttcttaggggagaagggggcagcaatgcccttgacttacccgatgtgcagaagcagggcgacttctttgtggaatcacctattattttgtttgccagcattatatggtatctcaaaatctatcaaggcggcaaatactgcacgttcccccatgcgattgagttcctgaaccgccgctatgaggatattttcccgatactgacctcttacccggaattggaaaactatctttctccgttcatggacgcatggctcggaggggctgcggagcagttgatggggcagatagcaagcgcgaaaatccctttgtcaaggatgatttccccgcagctctattgggtgatgtcggacagcgagttcacgctggacatcaacaatcccgaagaaccgaaaatactctgtgtgggcaacaatcccgaccgtcagaatatctacggggccgctctcggtctgtataactcccgtatcgtgaaactcatcaacaagaaagggatgctgaagtcgtcggtcatcatcgacgagctgcccacgatttatttcaaggggttggacaaccttatcgccaccgcgcgaagcaacaaggttgccgtgtgtctgggctttcaggatttcagccagttggtgcgcgactacggtgataaagaagcgaaggtcgtgatgaacaccgtcggcaatatcttttccggtcaggtggtgggtgaaaccgccaagacgctttccgaacgcttcggtaaggtgttgcagaaacggcagtccatttccatcaaccggcaggatgtttccacctccatcaacacgcagatggattcactcatcccgccgagcaagatttccggcttgacgcagggtatgtttgtcggttcggtgtccgacaacttcaacgagcgtatcgagcagaagatttttcattgtgagattgtcgtggatgccgagaaggtgaggcgcgaggagaaagcctacaagaaaatccccgtcattaccgactttacggacggggacggcaacgaccgcatgaaggaaacggttcaggcgaattacaggcgcatcaaggaggaagtgaagcagattgttcaagaggaactggaacgtatcgcaaatgatgaaaacttgaaacacctgttgcagcagaaataacagattcctttatatatgaaaaaggggatgtgtcaaaacacccaaaatatgaaaattacccctgtcacagatatctgtagcaagggtaattttgttaaaaagagagttttgacgccctctttttattctcagatttgagatgcttgttgatggtggtaatggcaagcgtcagcaaataatttttcagctctgtatcgtctttaagcagtatgctgtattcttcggcaaacattctcaacagtctggttctgagtttcgacatttcttcaccgaaaggtatctgtcggttttcttgccaatactcaatcactacggaagataccagccacttgaactcggatttcatctctttgccgagtttcttgaagcggatttgttcgctaattggcggctcgttgtatggcatcatgtctgcctggtcataaacggatatactgccgataccataatccatgattatcggtaaatcagtttttacatcattcttatgtttcttctttttagccatacccgttattgttgcaggaaacctttacctttatcagtaagatagtatttctgttgcggactcttggagcctatgggataaagtgaaaggaccaaaccggaatttattgccggatggatatagttctttaagaaattccttttatctttcattcccgttttctccatgatttctttagcagagagagtgttgttcccaatagcagacaacagttttcctaactgtggggttactgtggggttactatagggttgctgtgggggtgctgtggggtcttgtcctactgtagttcttgtataatgaaacacaatccatacagcattgccgtcggtatgaaactccggatccggaataccgacacggcgacattcgtttaccataagggctatgccacgtccccaactctccaatactgcacttttgtacagcacattggctactatcagattttgtggttcggaattgtggccacccaacagtttctcaatggtaatatcaggcggaaatgttccgctgttttcaatctccacgcggtcatcatagatagcaatcccgactgaactgccggggcgatggtaaacacgatgtgcaaaagcatttatgcaacattctctcaatgccttatatggcacattcagttcctcttctctgtacaaaccttcaattttaccggagagggacaaatgcttgaagaaaaatgccattgcagcatccagcaagttgaatatattgcctgtcacacgctgattatctaaaaattcatcttttgtcgttcctttgaatcgggctaaacggagcagacattggggataatggtagaagttccgtccgaataggacaacggaagcattgttcagctttccatcattcaacaagtcaaatttttcaaggatggttcggacatcctcctgcatagaaccttccggcaaacgtccgcctctgattcctccacgtactgcgcccaagattgccgtttcgtcaaggtcggatattttcaagccgggattttgcatggaatcccaagcataggttccgccacgctgcataaccaactggttgtatatatcctgcggcatggcagatgtaacgctctctatccgttgataagccctccccttataggtgaacgggcgcatatatcgttgttcttccgcagataaagctatgacacttttgttgttctccggaatgtctgtataggatatatcaatggtcgcaaacggctcgattcgtctgatggcttccgcaatgtcccgctttgttttgtcgcttacatcctgtccgatgattttacccttgtcattcacgccgaacagcaccgtgccgcccgtaccgttcaggaaggcacaaagagtttccattccgcgctccaactgcccggtagtttctttgaactcaactgtcccgccttcggctccggcaatcagtccgttcaatatttcgaggttatctattttcatccgtcattgattaatacttgcaaagttaatgattttaatcggctttccggcagataatagagtgattgtaaatgaagaaggataagaaaccgtataatccggccgcttatcctttgtttggcattcgtttatctcctcatccgctccaattcatcgtcatgtcgcatcttcgcgttcagtttgtcctgcatcttttcaaggaagtaggtgcgactgtcgcttttcctgcgtttgatgtccgtatagaagcggtagcagtctttggactccacaccgaaaaaggaatagaggacaggggcaagctctttcagcgaagccttgccgccattgatgcagccggtggcgtagagggcatagattagttctaccaactcgacggcattaccggtccattgcagggctgggactgtggctttggtttcggatatggatgttagtggtggcacggaggtaattgcagaagcggataccatcttctgcatctttcggatgaaggataacgctttgcggatatacacagtgacaacattctcatccgatgccgacaagttctgcggatggtgctgtaattcgatttcggcaaaagccaacgccacaataatatgcttggcatcattgccgccgtagcacaggtttattacttcctgcacgaatccgccgtatgccgtttccgtgctaccgttgtcttttccgtttatcagggcgaaaaactgtgtttccgccaatatgagatggttcattatcttttctgttttgagggtttacacttgtttatcagtgtgcgcacactgatatatggtgcaaatcatagccctaaacacgagaaaagattgtgagaaaactgtactacattgtttttcagaaaaataaaattcaaaaataattttatccttgattgcatcccttgtgaaatgtgttcagattctgaacatgtgttcactttctgaacacggaaattccgccaagatgttcataatctgaacattttatgcccgtggctctttatgataggtaagccggattactccgtccctataggttttgttctccataagccgccagtcattcataggcaatgcggacttgaaaaaatgcgctccgtttccgctgatggttggaacaacgtatagtatgatttcatctatcacgttcatccgtagcagtccattggcatattcggtattcccggcagttacttccaacaaatggcaaatgcttccaccttcctctctccattcttgaagcatggataccggataatcgggtgtcagtttgtataaggcattggcacgtatttcatccatcccataatttttggtttgaagcaaccgcttccggggatgcagtttcaccggacagccatctattgagataacggcaagtaattgtattttcgccataacgtatttcctttcctttttggcgaggcaaaaaaagtagcgtgcaattcacactactttcaagcgacggctctggtaaagcctttacggagagtacgtgaatgcacgctatgcgtaagcatagcataagcatcacgcaatcgtctccgtagtttaaatttaccagattttcgctcgaaacgccttgcggtcttatgtctatatcatcggcgaaaagttaccctatcgcctgctattttctgaaatacaattgcaaagttaatcaattattgccatttacaaccatactccggtcagttttcttcattcaatccatactctaccaatttattatacagcgttgtcctaccgatatccagtatctttgcagccattttcttgttaccggctgcttgtttcaaagcacgcaggatacgtcctctttcttcatccccgctcttcaatgtaaaacaagcggaagtagcggacggttcattgtcaagttccaaatcggcttcggttatcatatcgccttctgattgcaggactgccgtctgtatcttctgtttcaactcgcgcacgttgcccggccacgcatgggcgagcagggcattacgggcagatgcggcaaaaccttttacttcacgttccaactcacggtttgccatttcacggaagaactcggccaatggcatgatgtcttccgggcagtcgcgcaagggcggcatggttatcacatactcctgcaagcgatagagcaaatcctgccggaaccgcttttccgttacggctttctgcaaatcctcgttggttgcagccactatcctcacgttggctgttttgtcctcctttgctccgacgggacggtaacggcgttcctgtatggcgcggagcagcatctgttgcatctccattgttaggttgcccacttcgtcaaggaacagcgtgccgccatccgcttccagaaaataccccgtcttgtttgcttcggcacccgtaaacgcgcccttgacgtgtccgaagaaggcggattgtatcaatgacggggacaaggctccgcagtccactgccacaaaaggtttatcggcaagtttgctttgttggtgtatatgttgtgcgatatgttccttgcccgtaccgttctcgcccagtatcagcacgctcatccgggtggtggctacaaggcgcacacgtttcttgattttctgataggcttcgccctgccggacgaatatcggaatgttccattgtagtcgcttttcatgttctttttgcagggtgcggataagcggtatcagtttatcctccaacaactgtttctgtatgtaatcctttgagccgagcttcatactttccactgccgtatgcacctccccgtaattggtcataacgataaacacctgttgtttgtcgttggcacgcatccaccgtaacaactctatgctttcaccgtcggggaggcgtaggtcggcaacgacaatatcatccacctctgactttaccaatagtttcttggcagtggcaagattatatgccgacatagtatcgaagctgtctttcttcagcaggttgcagacataatcgttatagacggggttgtcctcaatcacaaatactttcatccgacaacctcctttccttttgcgcaagttctatgataactgttcccatacgaagcatggcatccacgcatttccgcaattccatttcggaacattcagattcttgatgcagcagttcatacaggttccacaagggtttgtcagcacggataacagcccatgaacttcgctgacggtgtatccattcgtccaacgccttgcggtcattcctctccatgatttcccggacagcctgcatatccttttctgtttcggttatcaaacggtcgagcatcgcccgtttgtcaccatatgcaagcagagaggacaagtcgggaagttcatccttgtccgtacttgtcaaaaggcatttgtctgatacagcaaccagttcggaaatggaaaatggcttgaacaggcaggcggtaaatccattttccaacagctcctcttcgctgcaactgccggaggcggtcgccacgacaatgggaatctctttcgagttgctgacacttgacgagcgtaacaactccaacacctcatagccgttaatctccggcatcttcatatcggttatcatgaggtcgtatgtgtgctgccgcatggcttccattgcatcgccaatagtggtgaacgtgtcgcaatgcacacctataccagcatacatttcctttgtcatggataataccatcggattgtcgtccaatacgatgacagaataaggtctttctatatgagccagactttctgcgcctgtctgttcttcaataccaatatcggcagtgttcattggcaactccacagtaaaacgactgccttctcctttttcgctttccaagcgtatagtgccgccaagcataccgacaatctgtttcacaatgcttaaccccaatccgaaaccgtcttgcgtggcggcgttggaaagccgctcgaacgctccgaacactcgctgttgttcttccgcactcatgccggttccggtgtcctctactacaagggtcagcctattgccgtcataacttatgacaagtgaaacgcttccgacattcgtgaacttgacggcattgcccagcaggttgtcgcatatctgtatgatgcgctccttgtcgccattcaggataataccctccgggcactcgatggtaagtttaagatcttttgcttctgcttgttgcgtaaactccgtttgcaacagctccgcgatgttttccaaacgaaacggacggacattcgcctgttccttgccgctgtccaagcggaagaagtcaagcagggagttgagcatgtcggtcattctcttggaggcttgcaggatattgtccgcataaccgcttatcttttcttcttcgttgtcctgcatcagttccgcatatccatgtatggcagtcagtggtgtgcgtagctcgtgggtgatggtgtgcatcgctttcttgcgtgaggctatcaacgattcgttttgttttacggacttttgcagttgcccgattaaatctgttgtcttatgtttgtactgcttgatgcgggtggcatagcggtgaatgatgatgtatgaaataataagcaacagcagcatgacacccgttatgatacctacctgcaagaacgatctttcgcgcatggcggatatttccgcctcccgttccagcaagtcagcctgcaccttgtggtccatctgctggataagggtttgcagttggcggttcagttccgcattgcggctggcaaggctgtcggcatattccgacagacgatggctctgggcacgttgttgcgctatcatatcacggttcagtgtgtaaagcatcgtggtggtcgtcgtcggaggtgcttcctgtttcttgccgaacaacccgagaaaacctttcctcctctgtttcttcggctcttcctgcctgctcgtttgcactatcaccggcacctgcttggctatccggcggttgatgtccgcctgttgttccagagcctccatgatggcgcacagccgcttttccttgtcctccagcaagtggcgcacgctgtctatgcgcaccgattcgtaatggctcttgaagcggcaaagcatactatccaccgccatccgttgccgccggtatgccgccacatccttatcgtcccattccagcaccgactcgcccaaaagtgacaactccaccacacccacatacgcatcgtgtgtttccttgcggaagcggttgatttcacggttctcccgttccagcaactccaagtcgcgccattcgccgagccacgtgcagatgatgccgcccaccagcaggactatcaacagatagcctgcggcaagcagcttgcggaaatgcttggtagtggtaacgaattgttcgctcatttgctgtttgtgtaaataccgttattcaacatacgcatataggtcgtggaacttcgcaggttcatggatgagaatggcggccatgctaccgatgaccgccataagtatggcatagccgaaaaatattttatatcgcagcgacactgtttgttgatgaaaaatataattggttaactaaatatcaatatcacaggatagtgatccccacccttcatatgatatcttagtacacatgttcttagctgtaatctgctatcgataaggaaataatctaattctcgacctgaaatatgtgttggcataccacaacatgcaaaattagcactatttcccggcctactcctggtacctgtgtaaatattctgataattcgcttggagtcatattcatgtccccaccaataataaatgggtgatttgcggatgataccaatttatttatatctatagcaccacatccggattggcaatgaatggtataaatttcaaggcctctataattaagaccaatagaccaccgacctgttcctgactgcgcataagaataggaagggctaaaatttatatctgcaatgacaccagtattacaccgtgtgttccatcacgtcctcctttctttattggggttatacttcggttctttccgttgcgggcggaactttttccgcccgcaacagcttactgcttcctcaaggtaggcaatgctcctttaagttcgtaacgccactctgagcctgcgttctgcaaggcggtgttcatggcatcaacggctttctgccaggtaacgacagagccgtccaccttcgtggctccggtgctttccctattgtagccgatgccttgttcatgattgttcttccaatagccggcggtcacggtggtgtagttatttcccaaaaagccgccgatatgcatatagccagtgctactacccgtactggttacgttgcccgtggcatagcaggcaaggaggctgcttcctgcgttcattcccaccagactgccgccagcgatattctttttggggtccatttctatgatcacgttgcctgtggcatagcaagcggtcagggtggcactcgaattcgtctgacctgccacgccgccgacatcgaccgttcccttcactgtggcagaggaactgcatccggtgatggaaccgcctatttgaacacccaccacaccgccgacatacaccgtgccgctgacgctgcccgacaccgagcagttttcaatggtgccccagccatatcctaccacgccgccaatactgccgccatatatttgattgcttgttatctgtacgccctccatcaccacgttcttcaccgtaccagctctattgagccagccgaacagacctgcatattcgtcatttgttgtaaaggtcagccccgtaatggtatggccgccaccgtcgaaggtgcctttgtatgagttgtcgtagtctgtgcctatcggtgtccagtctttgcctgtgaggtcaatgtctgtgtcgagggtaatgttaatgtcggtcttacctccgttcactaatttggctatattcatcagaccgtcggcggaggtcacggtgtagctgccgttgctctctatggtatagcccaggtcttttgccgcagcgagggagacggtgtaggtatattcaccgcccgcctgccagtcggtagcattcttcatcttataaacgaaggtcttgccgttagtgaaggtgcaggtaatgaatgccgtgccagctgccacactttgcggggctacgatggcggtgtaggtgttgctgcccttgtcatacggggtgatttcggcagggttgtcgccttcggtggagaggcccgtcagtcgcacggatgccagcccctcggtgtagtccgtcagaacgatggtcactcgcgccgtgcggtgggtgaagcggagcgtggggctgccgtaggtcaccgtctgcccgtcggctacgatgaggtcgctgccctcaaagtctttctgggtactttggttggcttttacctttaccgcaggtggggttgtctcgccagcggtgtagggccaccacgctgtgacggtgatgtcgttgtggttggtccagtagtacgggtcggtggaggtcagcgtggcgctggtggggtcggcggtggagggcgtcacgtcgtatgccttcaccgtaccgtccatcaggactgccacgctctgcacaccctcccaattgccatccacaggggcacgggtgccggcgatggctgtcgcggcgggattcagccccgtggcggtgaagacgatgggggtgccttccgccccttccggtaggaagcccgcttcgtcctgcgtgcaggcgcccaataagagggcgagcgctgcaagtgcaaaaaatcttatcctcataatatctgttattttattactctggttctttccgttgcgggcgtaacttttccccccgacggtttactgcttcctcaaggtgggcaatgctcctttaagttcgtaacgccactctgagcctttgttctgcaaggcggtgttcatggcatcaacggctttctgccaggtaacgacagagccgtccaccttcgtggctccggtgcttctcctattgtagccgataccttgttcatgattgttcttccaatagcaggcggtcacggtagtgtagttatctcccaaaaagccgccgatatgtacatagccagtgctactacccgtactggttacgttgcccgtggcatagcaggaaaggaggcttattccgtcgttgaatcctaccagaccgccgccagagatattctgtgtgggggctatttctatgatcacgttgcctgtggcatagcaagcggtcaaggtggcaccaaaattcgtccaacctgccacgccgccgacatagagcgttcccttcactgtggcagaggaactgcatccggtgatggaaccgtccctttgaacacccaccacaccgccgacgctcaccgtggcgctaacgctgcccgacaccgagcagttttcaatggtgccccagctatatcctaccacgccgccggcataacccgacctgtgattgcatgttatctgtatgccctccatcaccacattcttcaccgtaccggcggcattaccgaaattactgagatagccgaacagacccgcatattcgtcatttgtcgtaacggtcagccccgtgatggtatggccgccgccgtcgaaggtgccggtgtatgagttgtcgtagtctgtgcctatcggcgtccagcctttgcctgtgaggtcaatgtttttgtcgagggtaatgtttatgtcggtcttacctccgttcactaattcggctacattcatcaggccgtcggcgttatagaccgtgtaggtcttggtgttgctgtcgtagatgtagcccaaatcctcggctgtgccgctctcgccgccgccgtcagcccagctgccgatggtgcaaccttctaacgtcaggccggtggtgttcaccttaacggtatatttatagcggctgcccgcttctaatacgacgttgttctgcggacggaagtagaaggtgccgccgccgagttccaccttgacgaacggcttgcctgccgcaacggtctgcggggcggtcagtgcctcgtaggtgttgccgcttgcgttgtaggtcttgatggcagtcgggttgccgttatcggcggacaggctcacgaggctcaccgtggcatcggcgacgctcgtgaatcccgtgccgggcttcagttcgatagtcacgcgtgccgtgcggtgggtaaattcaagagtcgggttgttaaattccaccttccggttctcagcagagatgaagtcgctgttctggaagtcagccaatttactctggtcttcggccaccttcacggcaggcatctgtgtgatgtcggcattgttgaagggccaccatgccgatacggtaatcgggtcgcggctggtccagtagtgcgggtcgttctcgcgtgaaagcgtggcactcttgaaatcggtagaagccgttacggtgtattcctttaccgcatcgcccatcttgagtgccacggaagtgacaccctgccagtcgccgtccacagcggcacgggtggaaggggctgccagcggcgttgcttctacggacagtccggtggcacggatgaatacagggtattcaccttcgggcagacggttatcgccagccagttcgtcctgcgtgcaggcggcgagggcgaacagcagtgcggtggctgcggggataaataatctatgtctcataattcttcattctaatcgattaattattaacatcttacatgtcagcacccacatctccaccgtctatatcgttccactttgcaatggtggcttcgctgacttcaaggactttgttgcgtaccttgacggtataggtatagttgttgcccgcctgcagtgcgccgtcgggcacggtgagtgtggcatgatattcctgacctttgtaattcacaaccaacggcagggatgcaactgtctgcgggaagaggatgatcgatgacgtgagaacgccgtctgccaaattcatggtcagttctccggtttgtgccccgttgtctgcggtggcaataccgtcggccgtgttgaacgtaccggtgagtaacaatccgtccagcgtgtaacgtccaggcttgaccacgctgaaattcacgccgtcgcccgcctcgaaggtaagggttatctggctcatgcggtggtggaaggagttgtcttcaccgcctttggcggttttgtcggtgaagcttactaccgggttgtttttgtctcccgtggctcctgaagcaaagaggaagtcgatggcaggctggttctgctgcgccgtggcatcggtcgtggctgtgaggatgcctcccgccgcgttgtacggatagtaggcgcggaaagtatgggtctttgtatcttcgatatagataacctttccttctgcctcaaatttcccgtttttcaggatgaaaggcacgttgccgtactgggaatcgttgccgatgtcggtgatgccgatacggtcgccggcagtccaggtggttccgctggcgcgggtggcgggggcgatgtcggcggtaaactgggcggccacggggtcaccgttcaggttctcgttgtcgttgttgcaggctgccagtgcgagggcgagcatcgcaagtgcaaaaaatcttgtcttcattatattctgttattatattagttaaattccatttcaataattgctgcaccttagcaaaatcaaagcaagctttgcttctgcgttcggtttgctaattatttacaaatcggcatttacatcatcacctttcacttcttcccagccgttgatttcgactccgtccacttccatgccttcgggagtctcaaccagcgttccgccgagggtcagcgattcgccctttccggtgttgaaccccttgagggcttccgtgatgtcgcttttcagcgtcgtgggggtcgggttgccgtccgcatagcggatttcacccgtcagcagttgttccgtgccggtcacacccagcaaccgcaccgtggctttccacttgccggcatcgtcaccttcggttatcttggtgaagggcagcacgacgtttgaagcggctccgtaggtatcggtagcgaaatcgagagttctggctgcacccgtcagatgggcaacaatctccgtgatgcgtccggcggcatcccccgtcggtttgatgataagcgtcagttcgcgtacctgctgcttcattgcggcggtcagcggatagtccttgtctttctcgatgctcacctgtttcgtataggtgaagaaccatcccggggcattgttcacaaaggcatccgttcctgcccggtttcccgtggctgcggcaatggtggcggtggtaccatttaccatgattccttcagcagggttccacaccgcaagggtgtagctgcccggagcaaacagatggttgggggcatgggtggcggaagtctccgtacccgtatagtcacccatggtaaccgtccatgtggtaggtatgtcgataccctcaccgcgtgccgaccagtcggctgtcaccgcaatcttcccatagtcgggatgcggcgtgtcataaagcgtgtccttcacgcaggaagagagcagcacggcggctgccattcctaccatatttatatattgtcttgctttcatactctattcctccgtattagaataacttccataccaatgtcacaccggcgttgatggggccacaccaattttttgtctcgttgccacagcgcacgcgcacaccatcgatgacttcatatttttcgaaatcggcattcaggtagcccaaaccgaggttgaaatcaagatctaatgccttgtttagtcgcagctgatagccggcggtgatgccgccacccatcaggtcgccctgcttgcctgtttcggaaagcttgtagttgaactgtccagccttgaacatcgcgcccagatgccaggctttcttctcacccatatagtaacgtacttccggagccacttcccagagtgcatagcggcggtctttgtcactccagctccaagaagtccacgagccgtttacggcaatgccccacgatggacagatgcgccattcaagtcctaaatctggtgtcaaggtagcccagcgcagcaggttggcacgcagggagagatgataatcagttgtgattttggtttccgacagcgtgtcggcaagtgtattttgttgagcggttttctcggcttctgccttttcagcggcaagtcgggcttcttccgccttgcgctgctcttcggcaagccgttcctgctcggcacgcttctcggtttctaagcgttcggcttccgccttgcgtcgtgcttctgcttccgcatccgtcacggctgtttcctttaccggtaccgtcaggcgcacggtgacaaaatcaccctctgtcacatgattgcgggtaatgaagttttcttccttgattttcgctcgtgtaatcagttctgatttaacacggttggcacgaatcttcgctgttgcaaggttcttgacttcactgctctgcgaattgcaatatccgtcaaccaatagcggcagtttgccgtcaagaattgttgctttgttgttttcgatacattccaacaggcgggcaagttccgtgtcattgccattccaaggcacgtagaacatgtccttctgcgtaacgaaccggaaggtgtaggtcgtgtctgctttctgctgcgcaatgacaggaaaagttaccgtcatcagccacagaaacagggtgagaaaagtgatttttctgctcatataaacttgaatttattatctttgtcttctccaaaggtaataaatgccattcagcgcccaaaatattacaaaaactttttctgttgaaatacagcgttttataaaaattgtcgtttgagcacttttcaaattgtcgtttgagcactttttttgtcgaattagcacttttttgtcgcttgagcactttttgaaaatgagcttctgagacctttttcatcggctttttaccacacaaattattccagatttgcttttttccacttgccaggcgtacatccttccttctctgtaaatgatttgataaagttactgcgggaaagaaaaccggaagactcagccagcttctgtatattgatttccggatgctccttcagtatgtttttcgcatactccaaccggagaccggttatccattcgcggaatgtcattttatacgtagtcttgatataagcggaaagataggtacggttcgtatgaagtatttcggacagttcttttatggtaagtccctgctggacatagccgtctgtctttatccagttggccactttctctataatttctgtataggacactggaacttctttctcagaaactatttcaggttctgtttccgtatctgtcagaagttcttcttcagactgtatatcttgctcaaaagcattttccacctgttcatagaacagcaggtagttctgatagctgtagaaaagatagctgtagaacggtattgacgacaaaatccagataaaaacatatttgtctggcagaaatgtcagcaatccgcatccgacaccgaagataacagcccaataagtgaatatggaaagccattcgatatatgtgcctatatcatccgcctgagtttcattgaaaatccgaatggctctacgatatgcaattatgactctgcgagctaaaacgattccaaaaacgactaaccatacagctaaagcaaataaagagattttttgcatgattccgcttggcaacaggaacaacacaactccggaaagagttgagaatataatccataaaatgatatgtgtccacacacgccgtttggtaatgtaaaaacgatcaagcaacattatcaatgccgaactgaacagagaatagcacaggaagtatgtggacatgttcatcaatatggcagaatccgcatttttgaatcggataccaaagaagaaatgtaccgaatagtttgccgaaagcagtagcatagctatacccataatctgtcgagagcggagataattcttgaaaattttcttttcaggagtctttgcaaacaaaaaataaaagccgaagaataacatcaacggcagtgcggtataaagtgaaaaactgtatatagatggttccattgttatgcttatttgattttgatacaaagttacgtctttttcttcacaaatagacacataatctatgatttaacgttatagattcggtcatattagattgaaaaattattagaattaaagccagtggtgaaaaattcaaccactggctttttctgtcaagacttcgatattaaagttttacacctttggattccgataaaccgggtctccctataattaaatgactgcgtacaaagtccacgtgcgggctttccggctgttgttccgtctgttttttctcgttgccttgccggttctcttctgtgttttcctgagccggagccagctcaagctgtatcttgcggtccagtgcggcgagttcggacttcagctgtttcagctcgtcctccttcttccacaccttgcccgctatctcctgcaactgcggaatctccttttccagcacttcgttcttagacttgtactggtcgatgatggtcggaatcctctccaatgcgttcagaaagtttcgtgcggcagcaatcgggtctgccatcgccagatgcccgttgttgtaggtgtacttgtagttcccctccaccacgaagcggttgtcggtgaactccagaccttctttgagtgtcctctcgctgaccacctttatcggaaagccgtaaagttccccgacagccttgtacagtccaccagtcgtggcgttcttggcgatttcctgcaaacgcttaccgatgaccttctcatccgttgaatccacgccgtccaccttgacaagattaaggcggctgccttccttatcagtctgcacaacggaaagaaaacggttccagtcttccgtcatggcttcgatgaaagccgtgttgttgcgcagttctcccgtcttggattccagcttgaactccgaatcgcgcttgcccttgttgaacgacttgcgttccccttcgagcgaggcgatacgcttctctaatttcgccttatccaaaaggtcggtattgccggagagcaacgccatatactccgagaagttcatacccgatttttcgtccattgctccctcgtcgatggtacgtgcgcccatcgctccacttttgagctgcgatatgaacgtctgcttgcagtgcagcagattgaacttgtagctgtccagcgacttttccaccgcgtagatgatgatatccacgttgttctcggcaaaatgcttagcaatctcgttcccggctctaacaccccgtccgtcacgctgttgcaggtcggacggtcgatcgggtaggtcaagggcattgctgccctcttcccccctaagaaccgtacatgagagtttcccctcatacggctcaagcttttctaagcctctgtttgtatgcagagaccggctcaaactacttcttgtttccatttgatttgcgggataatttaaaacattcatcatgaaccaacagattgcatttctttccgttttgaacggttggcatgacattccatgccttgtgcgtatcaataggctcaccgcatataggacatttgcgtccttgcttttcccataggtacagcagtgacttgcgtccttttagcgtaacaagcattttcgacttctttcttttatagaagtacagacgacagtctgcatcaaatgggttcatgtctcctttaatctgcgtgtattgcaggaatggaaacgatgaagtcagagacaataatgtcaattggtcttcctttccgtttggtttcttgaattttgaagcgaaagtccatttgtttcctcgaatgtcatgccaatatcggtcttttatccaccgtttccctttcttggaatgacggcgttttgcccattgccatagtgagaggaatatctgatggtcgattctgtgaaatgaatcacgtgtcgctccatgctgataataacctccccatcctcggattttagagttcaatattctgattaacgactcctgtctgcaacccttgttctccttaattaccttacggatattctccataaagcgtttctcggatttctttgtcggcttggtcaatatgtccttgccgtatttgcggatattaaagccaagaaaatcaaaaccgtcatgcacgttggttatcaccgtcttttcctctgataaggtcagacctctttcagacataaattcagcaaccaatggcttgatttcattttcaagagtttccttgttctcgcaagtgatgataaaatcatccgcataacgtacaaggttcaccattggtgaatacaacttaccattaacatgatggcgcttatatctatctgcaagagctttctgcaatccgtccaaagtcatattggcaagtgtcggagaaattataccaccttgcggtgttccttcctcggtcgggaacatttgcttgttgaaaacatagccacatttcaaccattttcggagtattgccttatccattgggatattggcaagtaaccactcatggctgatatggtcaaaacacccttttatgtcaccctccaaaatccattcgggagaatatccctttcggagaatgttatgacattgctgtattgcatccatacagcagcgttccttgcggaaaccgtatgaacgagtatcagctgtagtttctgatacaggctccaatgccataagatagagtgcttgcatggctctgtctttcattgtcggtattcccaacggtcgcagtttgccgttgctcttcttgatatgaactcttctcagcggcattggctggtagcctctgcgtttgagttgggttattgcttgcgttttagctttaggggtatcccatatttctttgtcaaccccaggagtacaaccacccccgttagaagtaaccctctttacggctaaggcttttgcgtaaaaagagtgggtaagcgtccattgcaaggctttcaccttgttatgtttgccttccttctgagcctttacaatacgagcttgaagcttcttaacagcttgctccgccttagtccagtctattctgtcccaatttgattgcaggttgtcagtcggcgcacacgattggtcgaggagattttctttgattttatcgttcatttgcattcctactttaaaaagttctaaaagtttattgtaaagaattaccatttggctaatgttgggtatttgcctcccaaacattaccacagaagtctgcccactttcgtggtaggttgatgttgtcccttgtcaactcgtgataagtggctcaaaccctatccgtcccattacagaacggcattcgctttctctgttatcttatacctgcacatcattcagcatccattactttcagcttacctgtcttttgtctgacaggagatgtacaggcttaccatgttccacatagataactaacggataggttaggttctgtctcatcctccgatggtctttacatccgtgtaatcctaccatggagaggattatctgaccgcatcccattttgggtagagtgtatcagtatcttgcactcttttacgacattacgaagtttactaacagttcgcttacgctaaccatactatccagcctcgccactctacggtatgatactaaccatacttgacttcccctcacggttctgtcttgtcttgcgaaagtgtactttgtcccgaccgcttaatacaacattaaggtgcatcggtcggtaggctaccgctgacggaacagcgggttaaagctgatacttaaagtatcattccaacaattatctatgcgacttcatgtcgcacccacggtgtatcaaggtgatggatggcgacgcatcttttctgcgcattcacgcccgttccgagcatacttgtggagccgaacagcactcgcactgtccctgcgttcatggcatctatcaccgccttacgagccttatccgtcttacactcctgaatgaagcgcacctcacttgccggtatgccgtaatcctccaccaacttgcgttttatctcgctgtacacgttccatccttcccccggctgatatgtacccaagtcggagaacacgaactgcgttcctttgtgcgcatcgtatttgtggtaatactccgctatcattttggcgcagtggctcgccttgttgtcggagtggtcttcgtaattggggtctatcatgcgcatatccaaagccatcttccgcgcgtagtcggtagcgatgagcatcttagccttctcttccgtttcagacagcggcaacctgcccaacaacgtcgcgtcacctgtcttggcaaattccatcagttgtttgatgaaatactcttggtcgggtgtaggcggtatgtggtgcagtatctcgttcttgtgcggacgatccacacccacgtcctccgccgtgcggtagtcggtgatttcgttgtaaaaggcggcaagctccggcactttgatgaagtagcggaaacgctccttctgcaccacgttgtttgtcacgttgaactcgaagtcggtcgtcttcttggcgaagatagccgcccatgcgtcgaaacagcggatgtcctgccgttccagttccttcgggcgcaggtacttaaagagcaggtacaattccgtcagactgttggaaatagtcgtgccggacaggaacgtagcccctaagtctttgcccgtacgctcctgtatagttcgtatggcaaaaagcatattcagggctttctggctcccctccgagtttcccaaccccgccacacggtcatgccgggtgttgaaagtcaagttcttgaattggtggctctcgtctatgaaaatgtggtcgatgcccatctgtttgaagtccaccacgtcatctgtgcgcgacttgatggcgtgttccactttctctaacttcgccacaaggttgtgcttgcgcttctccaatcctttcagcatcgcccgcgacacgttcttgccttgctgccgtaagacttcgaggttttcctccaccgtgtcaagctccgcttgcaggatgcgttgctgcaactccggtgactgcggtatcttgccgaactggtcatgcgacatgatgacgcaatcatagtcattgtttttgatgttgttgaagaaacgcacacggttggcggtcgagaaatccttttccgaagcgtagaggatgcgggcattcggataggcagcttgataagtggcggcaatctccgcgacattggctttcagaccaataatcatcggcttgtgcgccaagttcagacgcttcatttcatgcgctgcaatacacattatcagtgttttacctgttccgacttcatggtcgcatattccgccgccattctgttttatcatccagacgcaatccttctgcgacggataaacgctttgaataccccggcttgccaatcctttcagattgaggtcgggaaacgtctggtgcgaaccgtcatacttcgggcgcacgaaacagttgaacttgcggttatacattgtcacgagccgttccttgaactgcggcgactgctcttccaaccattccgagaacccgttgcggatttcgtcaatcttggcgttggcgagctgtatgccctcgctgtcacgcaccttgatgtcgttgccgttctcatctttgccaatacttttcatcatgtcgggacaggtgttgtgcaaagcgtgtttcaacaggtgcataccgtcatagttccggtaatagccctttaccagaaactcgtccgtgatcttcatggtgcggtagccgcacgccacggaaaactcgtccatgctggcggaataggcgattttcacgtccgtgtcgaaaagatggctcatgtaggcggcatacacgcccgtgggaatccagcgttcaccgaagttgaagtcgaggtcttcaaaggcgatacgctgcggctcggcttccttcaaagcctccaaagcctgtttcacttccggcaatcttttgctttccagattattttccatccatgcctctatacgctccgccttctctatcacgtttcccgcgatgaagcggtctttaatctcgtaaccggttacgagcggattgtagaagatacgccccttgagggcattgagaagctcctcttccgtactgtctgttatcccccgcatatagttgagattgaccgtaccatacttgttgagcgatgcagacaaggcttcttccggagaaccgacgttggcatggttctccaccgagaaggaaacgggacggtcgaagatgtccgctttgacgaacttgccgtcctccgcacgttccagcgaaaggatgtcgcgccctccggcgtccatcatcaccagtttcacgttctgtttggcgttgaggttgccataacgcatgacaaactcgtcgtaacaggtgttcaggtgttcacgccaaggtacattttcctcacgtctgttcgattcatagcggtacaaccgctcgtatgcgtcacggagcgatacatacagcaacgctttctctttctgataaccggttagtccaagcggctggaaggttgcaccgtagggagtaatgtccttcagataaccgatgtcgcgtgccctgtttgccaccagcgacccttcacgcaggtgcatttccggcgtgcggtgatagggacgcggcgtaaggtcgagggcttcttttttcggcttttccgtttcaaattccgggaacagggaagtggcaaccgtttcggaagtaggcacaacttctgccggtgtttcaggttgctttatttcttccgtttgttccggctttttatccatattgtccgaagaaggcgcaaaagcagggttcaacgtgtctttgatacccatctttttcagttgttcctgcctgtgccgttctgcctcaagccgtagggccttgcgccgttccgctgtcagactcatcattgtctcatagaagccgttgatgggaggattggtttcccaatccagagtggcgtaaatgtcgtccgggtcgtttggcttttcggcattttccggcttttcttccttattaccgtttaccggcttggcggcttcaacgggtggagtaactttgacctgcggtttaggcgtggacggcataggcttcggcttgctttcctttttcgctgcctttttcttttttgccggttcctctatgggcataccccaaaggtcgagcagggtaagctgcacggctgacgaatggttgggttggcgcggctcaatctccggcttttcctctatgggctgtgcctgcggcttctccactcccttgacaggctcaattacagaaacgggggctattacagaaggtgataccttttctgttttcggagcaggttgcacttccgcagccgtgctttcctcctttgtcggatgcaggctgtgtttctcatacagtttcctgtcaagttgttgcagttctattttcagatgctcccgcaagtcttccgccagttgtgcgatgtccccacggtgcaggagtttataggctggtttcccgtacgggtcggtacttctgatcaaatccgtgtgtgaaagcgagccgatgctccatacatacccatttacggaagtgccgataggggtctgttcggtctgcacgaagagtttttcgttgtaatacagttcaccattctttccgctgttcttttgcaagataatcaggtcgctgcccacctccgttcccgcgttatccgtaaagaggttgttcggcaggcgggctacgcccaccagattggtatggttcatcatatactcgcgtatgggcgcgttggtcggggcatccagtaccccctgcgaggtgatgaacgccacgattccgccttcacgcaccgcgtcaaggcttttcaggaaaaagtaattgtgtatcgtccgtgccgccgagtgccttgcaggatccttgctgcccgaaaattccgggtcgaacaccgccacatcgccaaacggtatattggagacagccaaatcaaaatggttcatgaacggcttttctatcttctcgaagccctgtacccttactttctgtccgggatgcaggtgcttcagtatcttgcccgtcatcaggtctttctcaaaagccatgatgtccgcgtccggtctgttctccagcacggcgtccacgaatgcaccgacacctgccgacggctccagcacccggtcgggacggatgccgtgttcatgcagcacgtccgcgatggtcccggttatctccggcggggtatagaaggcggtcagcacggactgcttcatggcatccatataccgtttgtactccgtctcgtcttttgtgttctcccgcagcaacctgtgcagttccacggtaggggcaaacagttcgaggtcggacttcgcccagtggacggcatccgtcagttcccttgcagggttgagtatgctcttcagtcccccgaaaccgcaataacgctctaacaagagccgttcgcgtgcggtgggtgtgcgctgttccctgtcaaggaggaatgccgtccgtatcgcctcgatgttgtccctcagcctctgtttgcggttaaacgccatactcttcgatatagaggatgacggctcccgtcagctccgtgtagagcaggtcatattcgggcgacagggcgaaattgtcgtccgagaggtcatagatggagaatacgtttccgacaagcggtagcagcttctgggtaaaggcttcacatttttctcccggtacttcacccgcaaattcgttctccacgacttcgcgcaggatggcgtgcctggagtagcgaaggccctccgtcagcaccttcatcgccagttcctgcgccccgtcggcaggatagccttcgagccttgcccgttcatacgcttcggcggcacggtcggttctttctcggatgaaggcttcatcggctgcctgttcgaacttgttcgtggtgaggtagtccagcaggtacagaccgtaataggaaaagtcggtccgaccctcgtttttcttcttgttgttcatttctttggaatttagtggattgataatgatgatagggataatcgttggaaaacgagaagaaaaaggcacccggtatccctccgagtgccaccactaaatccaaagtatgagtgtaatccggtatcgaagaacaattcattactctgaaccagtggcaaagttaaacatttattttcttcttttcgcagaggtcgctttacttttcctttctgggaacacgaaaaccgtgttatagtccccgtcaaaggcgactacggcatcaaaactcttgccctgcttgctcttgaatcctttgagcagtttcgtgtgtccgtcggtgagcaggtttttgatttcatcatcagagagggtgcggtttgctttcaggcggaacacgggcagaccgcactccgcgttgtcgcagcggacgaccttgccgtaaaactgcatcgtccccgctccgcacttgggacacttgcagccggaatccctgcgggcgaacagcttgtcgcacgacagcagttcggaggtaatttcccgtgtatatgcctcaatcttcctgcggaagtcatcggcgggcagttccccacgctcgatgcgtgccaattccttttcccattcgcccgtcatggcgacatcggcaatacgcatcgccttcacgaccgagtagagggcaagccctttttcggtggggacaagcgacttcttgcagcgttccatatagccgcgcttgaaaagcgtttcgatgatggacgcacgggtggcgggcgtgccgatgccgcaatccttcatagcctgccgcaatgcgtcgtcctctatctccttgccagtcgtttccatcgcggacagcagggtggcttcggtatgcagcggcttgggtttggtctttccctccgtgatggaggcggctttcagtgccagcgtgtcgccttcctgccaacagggaatggcggcggtttcctcttggctgttgttctcttctccattctccttgccatagacggcacgccatccggcttgcctgatgatgctgccttttgccacgaactccactccggcacactctgccgtgacggtggcagtgtccttgacgcatttttcggagaaagcctcaagcatgcgcccggctatcatgtgatagacggtgctgtcctctttggagaggaacagcggcttctcgcccgtgacgagcagggcatggtggtctgtcaccttgccgccgtccaggctgcggcgtgtcggcacggctttcggctgcaacttgcccttccattcgggcaggctgccgatgaaggcaagcagcttggggatttccgcgaacacgtcttcgggaatgtagcggcttccggttcgcggataggtgatgagcttcttctcgtagagcttctgcgcgatttcaagcgtctgttccgccgtgaagccatgcttggcgttggcttccttctggagcgtggtcaggtcgtacaggagcggtgtttcctccgtcttctccttgcgttcggctttcgtgacggtggctgtgcctgccgacttcaccttattatacagttccgtcgcggactctttctctttccatttttcggaagaggaaaacttcaccgttccttcatcgcagccgtccgttgcgatatggagctgccagaaggcttcgggggtaaagcggcggttctcccaatagcgtgcgcacaccatcgccaacgtgggtgtctgcacccgcccgacggaatacgtgccgtgtccggcggcgatggagagagcctgcgtgccattgatgcccacgagccagtcggattcgctccgcgctttggcggcgaggtagaggttgtcatacttgctccccgcttcgaggttgcgcagtccatcgcggatggccttgtcggtaagcgagcttatccagaggcgcacgaaaggggtggcgcatcctatgtaatggtagaggtatcggaagataagttcgccctcgcgaccggcatcggtcgccacgatgatttgctcactgtcattgaacaggcgggttatggtttttatttgtgccactacgccgctgtcgggtttgtagcccttctcagcctttacctgacggggtatgagcgtgaaggagtcggggatgacgggcaggttgtcacggacaaagccgcgtatgccgtaaccgtcgggcatggcaagctggacgaggtgcccgaatgcccatgtcacggcgtagccgcctccctcgaaatatccttcctctctctttgtcgcgcccacgatacgggcgatctcacgtgccacagacggcttttctgcaatgattgtcttcatatttttctgtcgttttgaattttacaaatgttacttcggatttagtggcggacaccggattacatcttcatgcccttattgtttttcttttgcggcttctcctgctgctgttgctgtgcggtgtccttcggggcggtctgtcccttccgcaacggctccttcaggttcttggtagcctcgttggtcttgccctcgctgttcaccgccacctgcgtgcggctctcgttggaaggcgcgatcttctgcgcgttgtcggggttggtgtcgtagcggtacgggcgtcccttctccgggttgaacctgatgtacatcgtggcgtggaagccctgcttgtcggtcacgttctccagtttcacggctttgccagccacgtagtcggctttctgctgctcggtgaagtccacgccgctccatttgctgatggggcggatgctgccgtcggcgttcgtccacgtgttgcggcgttgctccttgttcgtgttggctgtattttccgtaccctgcgcctgtccctgtgcggggttgttcttggcttcctgtgcttgtgcggcacgtggcgacctgccggttcccggcacgaactccacgccgcgctgctccacgttcacttgcagggtggtgacgaacttcctgccgtccttgcgttcgatgagtttgtcgcgcacaggcagcccggcacgcagcatgtcctgctcctgcttggtgatttccgtcttgccgatgcgctccggtatgcgcaccttgtttgccgggacatccgtgatttcgttcgtcttgcggtcgatgctgacgaacgaggggatgatctcgcccgtttccctgtccacgaggtccacaaccctgccgaggttgcccgtttcgcgcaggttcttccggtcgtcgtcggagaacttgtgttccttgtactcgtcgagtttctgctccttgcggatgaagtgcggcacaaggctgacgttgccctcgccgtccttcttgaaggagaggcgggcatccagctcgaaagcttctccgccgaaattgggcgacaccctcaccaagtcggacttgccgtagttgagcatcctgtcaaggttgcccgacttttcaaggtcgtcgcgcttcacgccccatttctcctccaactccttccagttgatcttgctctcgtcgatgggttggtagccccggttgctctgcgcctgctgcgggttttcctgattctgttcgtttttctgttccatttcttcctgttttttaggttcgtcatcttgtttctgtcccggttgttcctgcttttcggcggactgctcctcctgtactttcttttcgtagccggaggtgtccaccttgtggggcgcaagcatctccttgttgccctcggggtctttcagcaagtccttgataacttccagcagcttgtcggcttggtccgccgcgacacggtagaaaccgaagcggctgggttccttgcactgccggaagaagtttttaaagaagttgtccagcacgtctccgtgcctgtcgaattgcaggaaactctgcgcgttctccgcctttgcgggggtacgcttgggtgagccgtcggcgttaagcccggctaccacgctaatctcgcccgtcttctcgtcgcggactatcagcacgtctttttctgttgttttctttgccatttgaaaaatgttttaatgggttatttattaaagaaattatggatacgcgccttgtagaaggctatatcttccttgcggaaatcctttacgtgttcggagaggaatgtcagtacgtcctcctcgctgtaataggtctttttgccgagcgtcttgtacggcaatgcaccgatgctgcggtagcgctgcagggtacgcttgcttatctggagcagcatgcagaggtcttggttgtcgaacatcctgatactttccatcgggtttggggctttgccggacggtcgcagggagagcagcagctcgttctgacggtcgagccgttccatcagcttctgcatccagtcctcaaaattgtttcgtgtaagcagttccatatcttatgtcctccttcctttgggtttgccgccgcccgtgcgcagcgtgtggttgcgtttcagttccgtcagtgtcgctgcatcttctgccacggtgcagtctgcgagcaggcggtctatttccgaccggcggtagcggcatttgccgcgcagcacgatatagccgatgcgctgttcgctgcgcatacgttggagggtacgggtactcacgttcagcaggtgcgccgcctcgcgggtggtgagcagcatgtcggaagactctcccttcctctcaccggaaacggcacgcacatagaccgctatctcggctatctgttccgtcagggcggtgaaggcggaactttcaatcgttatcactttcatattttgtcctttcttttgtttctctgcggcaaaattcggcaataaacaaaaggggctttaacaactcattacgtgactcacgtaagattttctttgaaagtgactccgtaacccggacaaccggcgcaacaagctgccgtatagcggaaaacggcacgcattcaaggcggctgcgttacctttgcggtaaatcattaaatgttttggtatatggaaatcgtatctatcgagaaaaagaccttcgagatgatgctggcgtcattcaacgccctctcggagaaagtcgccgccctcaggcgcaaaagcgacggcgggcggctggaaaggtggctcacgggcgaggaggtctgcgggcagttgagaatcagcccgcgcacgttgcagtcattgcgtgacaggcggcttatcggctactcgcagatgaaccgcaggttctattacaggccggaggaggtcaggcggcttattccgcttatcggcacgatctatcccgatggaaaatgactctgtttttattaaccacttaatccgatgttatgatgaacgagaacaacgaggttttctcaatggaggacgagccggttgccaccgcgatacagaatatgctcaaaggctccaaatggctctccgcatttttggaaagttaccgtccgccactggacggggaacattacctgacggacagggaggtggcggaaatgctccgggtaagccgccgcaccttgcaggagtatcgcaacaacaggatgctgccctttatccttctggcaggtaaggtgctttatcccgaatcgggactgcgtgaactgttggaggcgaattacctcaagccgctggaataaggcggttgcatgaaaaaaaaggaaacggacagcacccgatggtgttgtccgtttcctttttcgttgtctgtatgcgtgttcagcagtatccggttttcccgttctgtatgaacatcacgtatgcctgcctcttttcctttgagagtgccttctccaccagccacatgcggaacacgtgtgtatagtaggtgttcagccggaaggctactggaatgatgatttcaagcgagtaaacatccgcgtacaggccgttttcaagctgtatgtagcggcatacctcgtagtcgttcagcacgtccgacttgcggacggctttgatggcggcgttcactgccgggacggtggcatggaactcttcggcgatttccccggcggtcatccatacctcgttaccggttacgctgaccgtcttgtcctctataatgattatgtcacgtttcatggcgtctctgttttagatggtacatcctgcaaattcctcgatttggttcaatcttgcggcaaggttctccatgtcttggttgagcttctctttggttatcttcgcgtatatctgcgttgtctttatactcttgtgtcccagcatggaactgactgtttcgatgggtacaccgttggagaggaacaccgtcgtggctgccgtatggcggctctgatgccacgtgatatgcttggtgatgccgcaacgcttggcgacggcacggatcccggcgaggcacgtgttgtagtggggaacagggaaaatcctgccgttttcgcacagcccgcggtatttgtcgatgatttgtttcgcaatgtcaagcaggcggatgttagacaccacgcccgtcttctggcggttgatgtttatccactcgtgttcatcgaagtaggtgcggatgttctcttccgtcaaattgcgcatatcggcgaatgacaagcccgtgaaggcgcagaacaggtagaggtcgcggtatagttcctgtttggcgttcttcagtttaccttccatcagcaggcggatttcgtctttggtcaggaaactgcgtgtcgtttcctccttcttgatttcatactccctgaacgggtcgcgtgtgagccattcgttgttgatggcgatgaacaccatcgtccgaagtgggcatacatacagccacacggtattggtgcagcagtgtttgtccgtgcgcagaaacatctcgaagtcggaaatgaaagcgggggtaagctctttcaacgcgatgtccttcacgtggtaacggatgttgagaaactcttgcaggtgcttgtaaacggtcttgtacttcaagagtgtgcctttggctttcatgcctgcttccacctgcttggcatagtcctcgttgtgttgctggaacacctgcatcagcgtgtgatagcggtgttccagtccgagaaaggcgttcttcaccttctctgccgtgacgaagttgtcacgctccatgatttcctgatagtgcttgttgatgcgcacccgcatcttgtcaagcatgcggttcgtttcgagtgccgccgtgcttctgcccgtgacacgtccccctttggtgtcccacaacttgggatcgatggtcagtttgcaactgaattgcgtctggctgccgtccaccgtgatgcgtcccatgacgggaaccgtcccgtcttttttcactacctgacgtttgaggtagtaaataactgaaaatgtactcttcatcgtccttaattttttttgttcaaaattagttggtgaagagccctcctctgatacgcaaatcgcggaagaacggcgcaatctttttttgttaccggattttttgcgtgagttgtcagtaactcactaatccttaaggccttgtttcgttattcgtgtccatttcgtcacctattgggcgtggttacgaacaagtaacgtagctccgtcttgatttggcttcggcgtggattgtaatggctctcggaataattggcagcgtaaatgaaacccctgtaaatcaaatccattaccatattcttccgcatttcacttttttgtagtaactttgtgagcaaatgattcactaatcatttcaatcggcactccgcgatacttggctgtcgttgcccaagaatgacggagcgtgtaggaagtgacaggagaattcaaacggagagcccgagccagatccttcaaacaattattaaatcgacgaagagcactctggtattcacggtaagctccttcatccttacgtttcttatcaccggacaggatatcaaacagatagtccggacaatcagggcgggaaggctgactgttgcgaagccggtgaatcatctccttcgcggtatccagcacttccacactgatcggggttttcgtcttgacacggttgtaccgcaatacgttccggtctaaagccgacttttccagatgtgccaagtcggcaaacgacattccgcaaaactggaacatcagagcggcaatagcctgtgtatggcgtaaacgttccgattggggatcttcataaagcaacttccgcaactcggcaacaggaagggccttcttctgacgaacatccacacccgtatagacatcgtgaaacaggcgggggatgtaaggagcactacccgcttccactccccggttgtagatactgcgaagcatacgcatatacgtggaaacggtgttgggcttcaacccacattcataaagatactgtccgtaacgtcgtaaacgttcccgggttacttgcctgaacgacacattgaacgtgccgcagaacaggctgaaagaaaggagggcatttttgtagacatgcgccgtagaataacgcccttcctttcgcaaacgaccgatgtagatctctccacaccggctaaatccatttttactcatcatttgcatcactagttattttataatatataccatttggcatgcagcaaaaaaacaaatctttttgcaggttcgttgcacgcttgccaaagtataatttattatttaaattatttaaccattgcaaaaattagcaaactatggcaaagaaaaaaacaaatcaacaagagaaaaaagtacaagtaaaaaagaaggtccaaaaacggaaaaagaacactagaagacatgtgaaaggggaaatcatcagttgggaggaactcgaaaacaggacaggattaaccggagatgaaacggaacttctcactgtttatttgcacaaattcgaaagaggggaagtacacgtcagatgctctaaaaaactaaaagacttagctgaatatatctacgaaacggagagcttatatatagctaaacatggcgggtttaaattgttagaaattagcagtatagaaacaaagttatgtaacatcaggcaagaggaacgagaacgaaaagaagaggaagaaaaacaagtaaaaaagagagtagagaataagcgttgacaaaaataattgtgcagaagaaacaaaagatatactttcgcagccgtttctagccgactaaagacaatgtatatctatcttcaaaaatagtgacgctataacaattaaacagtatcactataatgaaaggatagcgaccctataataatcatatacagtcactatcctgaaggggagattttattcgtaaaaaaacaaatattaaaaaaaacagaagaaaaaagatgaaaagaaaaatagacaaaagtaagttagaagcctgcaagttagtatggaaaaaacgtattgccgccgaaaagggtatttcggaaaaatgcgcagaaaaaactgtgcaaagctgtatagagcttattgaacgaatgttatatggaaatgccatgattgctttccataagcaagacggcacattctgtatggaacaaggaaccttggttggatatgaaaaagattttcaccgggagttcaagatcacttcccgacagatgtctgtggtctactggagtatggagcaacacgcgtggagacggtttatgatcggaaacctgttggaatggaaagcgattgtataacatttaataaaaaatattgaactatgagtatgattaataaaggaatcccctatttccccacacctgcaaattttttcgacgaagaaataatggaactgttagaagctaaattcggaatcttatcctcttatattgtcatgagactactctgcaaaatctataaagaagggtattatatttcttggggaaaagaacagagtcttatcttcgtccgtaaagtaggcggaggtattaaagaggaagtaatggagaaaattatagagttactgctggaaaaggaatttttcaataaagatatttatgagaaatatggggtcctgacctcagagcagattcagaaagtctggttggaagctactgtacgaagaaagattgatttctctaaattaccttatttgttggaagtccggccaggaaatggtaaacaaaaaggaggcacgaataaaaaagatgcagacatttttaaagctgacgcggaggtgaatccggaaaatgaggacatttccggacaaactaaaccaaaccaaaataaactatcttctgaggaggaagaaacaagtaatgcttcgtttgaaattccggggtatgcttacaatcagactacacacaacgtaaccggactgctggaaagcctggaacgccataaagtgacggatctgaaagaaaagcaggcaattatgaagttgtcggattacggtaggaaaggcacgcagatatggaggctgttcagcaatacgacgtggggcaagatcggggcaccgggaaagtatatcattgccgcattgaccaacaagcagaaataaacgccgaatgataaaaaaaggtacgaaaaaatctgtgctattcacaaattcttcgtacctttacgctccggtaaaacaagttctatccacataaaatataacaaaatggaaaacagaagtttagtaaccattgccgaacattctaaagaaaaaatcctctacatgctcgaaatggcgaagcagtttgaaatgaaccccaaccgccggttattgcaaggaaaggtagtagcaaccctgttcttcgaaccttccacccgcacccgcctgagttttgaaacagccgccaatcgtctaggagcacgtgtgatcggattctccgaccccaaagctaccagctcgtcaaagggggaaacactaaaagacacgattatgatggtgagcaattatgcagatattatcgtcatgcgtcactatctggaaggagctgcccgctatgcaagtgaagtcgctcctgtgcccattgtcaatgccggagacggagcgaaccaacatccgtcacagacaatgctcgatctatactctatctacaaaacgcaaggcacgctggaaaacctgaatattttcctagtaggtgacttgaaatacgggcgtaccgtgcactccctgttaatggcaatgcgtcacttcaaccccactttccacttcatcgctcccgatgaactgaaaatgccggaagaatacaaactctattgtaaaacgcaccagataaaatatgtggaacacacggatttcagcgaagaaattattgcagatgcagatatcctgtatatgacccgtgtgcaacgtgaacgcttcaccgacctaatggaatatgaacgggtgaaaaacgtttatatcctgcgcaacaagatgttggaaaatacccgcccgaacctgcgcattctgcatccgctaccccgtgtcaacgagattgcatacgatgtggacgataacccgaaggcatattatttccaacaggcacaaaatggtctgtatgcccgtgaagccattctttgcgatgtattaggtatcacattagaggacgttaaaaacgatattttattatgagcgaaaataaacaagcattgcaagtagccgccctgaaaaacgggacagtgattgaccatatcccttctgaaaagctctttaccgtagtgcaactgctcggcgtggagcaaatgacaagcaacatcactatcggtttcaacctcgacagcaagaagctgggaaagaaggggattatcaagatcgcggacaagtttttctgcgatgaagaaatcaaccgtatttcggttgtggctccgaatgtgaaactgaacattatccgcgactacgaggtagtggaaaagaaagaagtaagaatgccggatgaacttcgcggaatcgtgaaatgcgcgaacccgaaatgtatcacgaacaatgagccaatggctacgttattccatgtgacggacaaggataattgcatcgtaaaatgccattattgcgagaaggaacagaaacgtgaggaaatcaccattctttaattttcatttttccaataaagaagtgaaacaggactggaaaccaggaacgatgatttatccgctgccggctgtgctggtcagttgcggaaaagaagaaagtgaatataatattatcactgtagcatggacgggtacgatttgcacaaacccgcccatgtgctatatatccgtacgcccggaacgacattcttatgagattatcaagcggaatatggagtttgtcattaatctgacgacaaaagacatggctttcgccaccgactggtgcggagttcgttcaggacgcgattatcataagtttgacgagatgaagctaaccccggggcagtgcaccgtagtcagtgcgcctttgattgaggaatctcccctctgcatcgaatgccgcgtaaaagagatcgtatctctcggttcgcatgatatgtttatagcagatgtagtaaatgtacgtgccgacgaccggaatctgaatcctgagactgggaagctcgaactggcggaagctaatcctctggtatatgttcatggaggatactatggtctgggagaaaaaatcggaaaattcggttggagtgttgaaaagaaaaaatcataaagacaaaggattgtataaccatgaatatgctgcgtaaaatactatttttcggtttgatgacggtagccggtacggttttcggacagaatcggaataccgcagacaaggtggaccgtcccaatacgaagaaaataaacttcggtgtcagggcagggttcaattcctccatgtttatggtttccgagttgaaaatcaaagatgtgactatcgacgaggtgcagaataattataaaatcggctatttcggtgctctcttcatgcgtatcaatatgaagaaacattatatccaaccggaagtgtcatacaatgtaaccaaatgcgagattacattcgataaactgggttctcaacatccggctatcgagccggattatgcttcggttcaatctgtattgcacagtattgactttcccgttctgtatggctataacgtagtgaagaaaggtccttacggaatgtctatctttgccggtcccaagctccgttatttatggggaaagaagaacgaaataactttcagcaatttcgaccagaaaggtatccatgagaaactctatccgtttaatataagtgcagtgattggcgtgggagtcaatatttcccgtattttctttgatttccgctacgagcagggaattggaaatatctccaagtctattacctatgacaatatcaactcggacggcagcacaggaatcagccggattatattcgaccgccgcgacagcgccttgagtttttcgctcggttttatcttctgaccattttctaccaaattccatttttgactaacatttttcttgtacttccttctttttttatttattttcattaactttgtacgcttaaaataaggtatctcgaattagaaatttaatcttattataaaagaatgaaaagagacgacttaattttcgacatcatcgaaaaagagcaccaacgtcagctgaaaggtatcgagctgattgcatctgaaaactttgtgagtgaccaggtaatgcaggcaatgggttcttgcctgactaacaagtatgcagaaggttatccgggcaaacgctattacggaggttgtgaagttgtagaccagagcgaacaaatcgctatcgaccgcctgaaagaaatcttcggagccgaatgggcaaatgtacagccgcattccggagcacaggctaacgcagccgtttttctggctgtcctgaatccgggcgacaaattcatgggattgaatcttgcacatggcgggcacctttctcatggttcattagtaaatacttccggtattatctatactccctgcgaatataatctgaataaggaaacaggacgcgttgactacgaccaaatggaagaagtcgctctacgcgaaaaaccgaaaatgatcattggcggcggttccgcttactctcgtgaatgggactacaagcgtatgcgtgaaatcgcagacaaagtaggtgctatcctgatgatcgacatggctcatcctgccggtctgattgctgccggagtactggaaaacccggttaaatatgcacatatcgtcacttctactacacataaaacacttcgcgggcctcgtggtggtgtcatcatgatgggcaaagatttccctaatccttggggaaagaaaactccgaagggtgaaatcaaaatgatgtctcaactgctggattcagctgttttcccaggtatccaaggcggaccgctggaacacgtgattgctgccaaagctgtggctttcggcgaaatcctgcaacctgaattcaaggaatatgcaaaacaagtacaaaagaatgctgccgtacttgcacaggcattgattgaccgtggttttacgatcgtttccggtggcactgacaatcactctatgctggttgacttgcgtagcaaataccctgatttgacaggtaaagtggcagagaaagcattggtttctgctgatattaccgttaataagaatatggttccgttcgacagccgttcggctttccagacttccggtattcgtctggggactccagctattacaactcgtggtgctaaggaagatctgatgcttgaaatcgcagaaatgattgagactgtgttatccaacgtagacaatgaagaggttatcgcacaagttcgtgcacgtgtcaatgagacaatgaagaaatatcctctttttgcttattaagaggcatactttattttaggtctgatattcggattatcggatactgtaacttatcaggtctgttcttttcaaaaaggacagacctctttttgtatttattaactttgctatccgaactatctgtcaggaatttcgtttttcttattacaaaaaaaagatatggaatatctcttcaacaaaaacgaattcaatcgtacggtacgccggaagagatataaaaaggtgtaccggactctatatacaagcatccccgtctttccctattggtttataaggaaagacggggatttactcattgaagcagggattcctgcggtccgattgttttttagctcaaaccttctatttctccatccacaatatcaatgtgcaacgcctgcggttctttaggaagtcccggcatgcggagaatttctccggctatcgcaacaatcatttcagctccgttattaatgactatatctttgatatggaactcgaaattattcactgcaccataaatcttaggatcggcagagaaagaatattgtgtttttgcaatacaaaccggataatgggtaattcccattttctcaatcagtttgatgcggttacgggcaatgctgctgtatgtgataacgcttgctccataaatattggtagctaccttttcaatcttctgctgtatgctgtcttcttctttgtaagtataacgcagagaaccggacggattattttcgatagtatctaccaccaggcgagccatatctactgcgccctctcctccttcagtgaatgcattgttgatagcgaaacctacgcctaactgctcgcaatgctcgcgcaacagttccatttcttcatctgtatctgtagcaaacttattgaaagctacaatcactgtttgaccgaaagaacgaagattacggacatgcttgtccagattgcgcaatccttctttcaatccttccatattcggttctttaatgcggtcgagactgacaccaccatgcattttcagtccctgtgccgtagccacgattacagtcagacgtggttggagtccgctcttacggcatttgatattgtagaacttctccgcaccgaggtcggcaccgaatccggcttccgtaatcacataatcgccgaatgacatagccagcttggttgccagaatagagttacatccgtgagctatattagcgaacggaccgccatgtacgaaagcagcggttccttcggtcgtctgcactaagttgggatgaatggcgtctttcaacagtacggtgatagctcccgccactcccaaatctttgactgtaaaaggtttatcatcgtatgtaaagcctaacaggatattttcgatacggcggcgcaagtcatccacatctttagaaagacaaaggatagccataatctccgacgccggagtaatatcaaaaccggattcttgagtgataccgtttgattttggccccagacctacgacaatactacgcaaagaacggtcgttcacatcgagcacccggcgccataggatttccttcagtccgaaacctttcgcctgattctgataaagataattatcaagcaaagcggaaatcatgttatgcgcagaagtgatagcatgaaagtctccggtgaaatgaagattaatcttttccatggggagcacttgggcatatcctcctccggccgcaccgcctttcataccgaaacagggtccgagagagggttcacgtaaagcaacgatagctttctttccaattttattgagtcccaaagcgagaccgatagatacagtggttttgccgatacccgcttttgttgctgtaatggcagttaccaggatgaggttacttttcttcaccttctcctcatcaatcagttgttcgggaatctttgcgatgtagcgaccataattttctacttcttcacgagggattccgatactttcggcaacttgctttatcttcttcaattcaatgctgcgagcaatttctatgtctgatttcatacaggatatgattagttttattttgaaagtgcaaaagtaacaaatctacgtgaagcaacaaactctttgcgtacaataactgttgttattggcataacctaaaacaacaacttaattatggaatggattatcaatcaactaagggtacaccctgaacttgctatcttcctcacacttttcgcgggattctggctgggaagactgaaaatagggaaattctctttaggtacagtgaccagcgtccttctggtaggagtattggtaggacaattgaacattacagtagacggtccgttaaaagccgtattttttctactctttttgtttgccgttggctacaaggtaggtccgcaattctttcgcggactgaaaaaagacggactgccacaggtggggttcgccgtattgatgtgtatcgtcagtctggtagcaccatggatacttgccaagattatgggatatcatatcggagaggctgtcggattgctggcaggctcacaaacgatatctgccgttatcggcgtggcaagcgatacgatcaaccagttgggcatcagcgaagcacagaaggcaacatatattaatgctattcctgtgtcttatgccgtcacttatattttcggtacggctggttctgcctggattctggcttctctcggtccgaagcttctcggcggattggataaagtaaaagctgattgtaaagaactggaatctaaaatggggacttcagaaatggatgaacccggattctcccctgcccttcgtccggtagtgttccgtgcgtacaagatcacaaataaatggtttggcaaaggaaaaaaggtgagtgaactggaaaagtatctatccgaacaggagaaactgttatttgtagaacgagtccgacaacggggagttgtaaaagaggtcaaaccggatatgcttcttcagccggaggatgaaatcgtactaagcggacgacgcgaatttgtgattggcgaagaagactggatcggcccggaagtgatcgatgcgcaactactggactttccggcggaaactctgccggttatggtgacacaccggactttcgccggcgaaaaggtatcgacaatccgggcacagaaatttatgcacggggttagtatccgtagtatcaaacgtgcgggtatcaatgtcccggtacttgcccggacagtggtggacgccggtgatattctggaacttaccggaatgaaacatgaggtggaaactgccgctaaacaaatgggatatgttgatcggccgacgaatcagacagatatgatttttgtcggactcggtattctggtcggtggccttgtcggtgcgttgactatgcatctgggaggtgtccctatcagtctttccaccagtggaggtgcattgattgcaggactgatattcggttggctgcgcagtaaacatcctactttcggaggtattcccgaaccttcactctgggtattgaataatgtgggattgaacatgtttattgcagtagtcggcattgccgcaggtcccagttttgtagccggatttaaggaggtcggtttcagcttgttcattatcggggcattggctacggccattcctcttctcagcgggttactaatgggcaaatatctgttcaaattccaccctgcactgacattaggatgtacggcgggagcacgtactaccactgctgcattgggagctgttcaggatgcggtggagagtgagaccccggctttaggatataccgtaacgtatgctgtcggcaacacactgctgattatctggggagtatttatcgtattgctgatgtaaacgtgaaaccaatacttttgacaacttatttactattctaactaatatagatttcattatggaaaaaaaagacaatagcccggctattaccaaaagttatgccaggaaaatggaaacgatcagtccgttcgaactgaaaaacaagcttattgacatggcggatgagagtgtcaagaagatagcacataccatgctgaatgcaggacggggtaatccgaactggattgctaccgaaccacgtgaagcttttttcctgctgggacaattcggactttgtgaatgtcgccgggcgttttcactggaagaaggaatcgccggtatccctcaaaaggcagggatcgctgcccgttttgaggcgttcctgaaagataatgagaaggctcccggtgccaatctgctgaaagagggttacaactatatgctaatggagcatgctgccgacccggacacactggtacatgaatgggcggaatccgtcatcggtgaccagtatcctgtgcccgaccgtattctgtattttacggaacagatcgtacaggattatctggcacaagagatgtgtgaccgacgtccgccgaaagggacattcgacttgttcgccaccgaaggaggcacagccgccatgtgttatctgttcgattcgctggaagagaatttcctgttgaaccagggagattctattgcactgatgattccggttttcactccttatatagagatcccgcagctacgacgttatcaatttgacgtgactgaaatatccgctgatcagatgacagccgacggattacatacatggcaatataaggatgaagagattgacaaactgaaaaatccgcagattaaagcgctcttcattacgaatccgagcaatccgcccagttatgcgcttagcccggagactgccgcacggattgtcaatatcgtgaaaaatgataatccgaacctgatgattattacggacgatgtgtatggaacatttatacccttaattccgcaacactattacaaatataactttttaagtacctgagcaacaaaaagttgctcaggaatttgccatgtcagatttttcacctatcttagtgttgcaaatcaaaatatgtatcaaacccgacagacatggcaaaggtagcaattaaatccgagaaactcactccttttggaggaatattttcaataatggagcaatttgactccagactctcatctgtaatcgactcaaccctcggtatgagatgcaggctgtatggttatcaatacagcgaaatcatccgttcgcttatgagcgtttatttttgtggcggctcatgcatcgaggatgtcaccactcatctgatgtaccacctttcgcttcatccgacacttcgcacatgcagtgccgacacgattcttagagccataaaggaactgacccaggataacatttcctacacatccgacactggcaagacctacgacttcaacacggcagacaagctgaatacactgctcctcaattgcctattgtccacagggcagctgaaagagggcgaggggtatgacgttgacttcgaccaccagttcatagaggctgagaagtttgatgcgaagcctacatacaagaagttccttggttatcgccctggcgtggcggttattggcaacttgattgtcggcattgagaacagcgacggcaacacaaatgtccgtttccaccagaaggacacgctgaagaggttctttgaaaggtttgaacaaaacaagcttattatcaaccgtttcagagctgattgcggctcgtgttctgaagagatagtggaagagattgctaaacactgcaagaccttctatatccgtgctaaccgatgcagttcgctctacaatgacatctttgccctcagaggttggaagaaagtggaattgggcggcattgagtttgagctggcctccattctcatcgagaaatggaaagggaaggcataccgtcttgtgattcaaagacagaagcggatagacggcgaactcgacctgtgggaaggagaatacacctaccgctgcatccttacaaatgactacgagtcttccgagaaagagattgtcgaattctataacctccgtggagggaaggaacgcatcttcgatgatatgaataacggattcggctggaacaggcttccaaaatcctttatgggagaaaacacggtgtttcttctgcttatggcactcatacgcaacttctataaattcatcatggcgaggcttgacgtgaagaggttcggactcaaagcaacaagccgcatcaagacgtttgtctttaagttcatctctgtgccagccaaatgggtcaggacatcaaggaagtatgtgctgaatatctattcatgcaacaatgcttatgccaatgtgttccagaatgactttggataacaccgacaacttatagtcgtgattttgcgtattgcctcaagtcgcatggtggggtaaggggcatttatatgtctttatggtgacattcgatgcactgtgccccctttttactaacgatgcagattcttttcgcttctgtatcatattaggcgcgtagttgcggatttgaggtatacctcatttccggtcattaatggcggaattgcctcacaatactctttgcgtttattctttctccaaatatttcggtgcaacaggctggagaaatgccgtaatcgcgctacacgaagacaacatctacgacaaaatgattgcccgcctgtcggaggagcaaaaagcaatcttgaacaaacgttactccagtatcgatttgcatccggaaaagctgaagtttattgaccgcatggtggcagacagccgccagatcgcattgaatcataccgcaggtctttcgctgccacagcagatgcagatgagcctgttctcgctttttgctattctggataaggaaaaccgttacaaaaccagaatgcaggaaatcattcaccgccgccttcatgcattatgggacaatacgggtttcacactggtagaagaccctctacgtgccggatattactcggaaattgatatgctggtatgggcgaaaaaattctatggggatgattttgttgcttatctgcaaaagacatataatccgttggatgtggtctttcgcctggcaaatgagacttcgctcgtattgctgaacggcggtggctttgccggaccgaaatggagtgtccgtgtatcacttgccaacttgaacgaagctgattatgtaaaaatcgggcagagtatcaagcgtgtactggaagagtatgctaatgtatggaaggcttccatacgctaaaaggtatttcctccctcgttcctttttatgaatgagggaggaaagatacgaactttgctcaatgtcatgtcttttgttacttgaaacgggaagtatccacgttaattgctacttaaacgtatgtacaaatgttgtcatcctatttttaaagagtttttctctaagaaaatataacagaaacgaatagtcaggatgaaaatttctatctttgtcataaatcaacctttacgaagatgaaaaaactgattttatttctttcgctgatattatcggtcggttttgcatccgcacagtcagaaatcccttccgatagtattcgtcgtgccccctcggctaatattaaggagtttggcggctttttattggatatgggattgatgaatgtagctcctcccaaacttcctaaattcagcctggatgtgccgaatatgagtaaagactataatcaactgttccgtctgaatacggatgccacatactcacaaggattctctgatgctttttctccttctgccttttccggtttcggatacgggtatggctgggggctgtcgtcttctccacagttcatgcaaatgggatcttttaagctgaaaaacggtatgaggattaatacgtacggagattatgacaaagacggttggagagtgcccaaccgaagtgccatgccttgggaaaagaataatttccggggagcattcgaactaaaatccgcaaacggtaatttcggtatacggattgaagtacagcaagggcgaaacggtccttactaagtatatgaaggctaggtttactatttgcctgatttaaaagccttatccgcagcgtacattgcatccgctatcctatcacaccacttatcaaactccagatcaggcgtttgactctcaggatgtgtaagcatataatgcacggattgtctcagaccgtccaccattgatacagtacagataaaatccgggacaagtctcttgatcttcgaattatcaaaaacgactgtggcagccttgtcacctaatagttcccctctgaaatcataagtttctccatgtccggcaagaaaatccgaagctacgtgtaacgcattcagcggttttcctaatgcatcggcaatggtttcataaatctgattccaagtcatactttcgtcggttgtgatatggaaagcattcccgatagcatgagggtttgccattaaaccgacatatcctttggcaaagtccttagaatgtgtcagtgtccataacgaacttccgtcaccggggataatcacaggctttccgtcaaggatacgctttaagatctgccacaaagatattaattctgcctttgactaccaacgttgtatacaaattactgattcttgtacctatattactgttttgcaaatatgatatagataagatattcttaaaagttttatctttgcctatgataaaactgtaagccgtatggatgaaattaccaaaattgaaactattgatcagtacgaccaattattcggactggaaactttgcaccctttagtgaatgtgatcgacttttcaaaagcgacaaaaacagtagaatactatcacatgaatatcggattctactctctgtttttgaaagacattaattgcggagaccttaaatatgggcgtaactattatgactatcaggaaggaacggtcgtctgtatggccccaggtcaagtgattggtatagataaccggaagaaaactcctcaacgtacaaaatcgatcggggtcttgtttcatcccgacctgatccggggaacttctttgggacagaatatcaagaattattctttcttttcttatgaagttaatgaagccttgcatctatccgaccaggaaaaagaaattgtaacggactgtatacataaaatacaaatcgaactggaacatgctatcgacaagcatagcaaacaacttattgtccgcaatatcgaactattactcgattattgtatgcgtttctatgaacggcagtttatcacacgcaatcaggtaaacaaagacattatcgtgcggttcgaacatctattggatgaatatttccaagggcaggtagcactgaccgaagggttgccttccgtgaaatattttgcagacaaggtatgcctttctcctaattacttcggcgacctgataaaaaaagaaactggtaaaactgcgcaggaatatattcagtgccgtatcattgaacttgccaaagaacgaatattggaaggttcgcaaacggtcagccagatagcttatgaactgggattccagtatcctcaacacttcagccggctatttaaaaaacatgtcggatatacaccgaatgaatataaacagcagaactaagaacatacaccggagagatcgttaacgtcatgggagataaagtactcaaaataggaaccgtgcatcaatgtaattgttgcctgggaagtaagacactgcatccgctagtcagtgtcatcgacctttcgaaggctgacttatctcctcatacggacattaaattcggattctatacgattctgttgagtgaatgtaagtgtgaggcctatgcatacgggcaccaatgttgtgatttctcggacggaactctcgtttgcctgactcccggagagtcaatcagtatgaaggagaacaacaaggaatttccttccaagggatggatattggcctttcaccccgacttgatttgcgggactccgctcggattcaatatacacaattatactttcttctcttattgtccggaggaagcactgcatctctctctacgcgaaaaacaaattattctggaattcctggagaggattcggcaagagcttgagcgctgcattgaccgacacagcaaaaaaatcatttcaaaatacattgaacttttgctggattattgtacccgcttctacgaacgccagtttatcacacgtagcgaagtcaataaaaaggtgttcagagaattcaatcatctgcttgataatcatttcaatgtgaaagtaagcctatcaactgatgtgttatccgatgaatattgtgctaatctcctgcatttatcgcctgcatattttaatgatttactgaaatatgaaataggaaaagagttcaaagagtatatccagttcaaacgtttcgagatagccaaaggatggttggtaaatacggataaaacgatcggccagattgcacaagaactagggttctctaattcacagtatttcagccgcttattcaagaaaatcacagggtgttcgccaaatgaattcagaatgcccaactaaaattatttagttaacggcagaaatccttaataaaaatagaatcgggaaacaaaactcttaatcaatgttataaaacatactttttttcttggattatttgcagatttcacaaaagtgcgtacctttgtaatgtgtttttcatagtattagatttaaggttaacaaaggttggagcaaggcgttgctcctttttttatgtctatacctcacataaatcctacaatcagttgtagaaatcactattttttcagtagttttgcagaaactctgataatttaattcaagaaacaaaatgaagacaaagcaaaaatattatcatcttataaaaccaatcatctttgtgctatttctatcttttagcatggcttcgtgtgaaaaagaagatattattcctgaatcgccggatatagaagatacagaaaatcctacggatactgatcccaatgaaattgttcctcctattgtacgggcaaataatgagcaaacgatatttatgtatctcccttggtcgaacaatctgacttctaacttctatcagaatatcagtgacctggagagtgtaatcgaaaagaatatactaaaaaatgaacgtgtcatagtatttatgtgtaccgaagctacagaagctactctttttgaactcgtttatgaaaacggtaaaagcgtgcgcaagacctataagcagtatactgatcccgtatatacaacagccgaaggaattacatctatccttaatgatgttcgggaatgtacaccagcccaacgttactctatgattatcggttgtcatggtatgggatggatacctgtatcaaatgcccaatcacgcagtaaccttcgtgtcaacaaaatgcactgggagtatgagaatgtacctatgacacgttatttcggaggattatatccccaatatcaaaccgacataaccacacttgctcaaggtatctccaatgccggattgaaaatggaatatatactttttgatgattgttacatgtcgacagtagaagttgcttatgatcttaaaaatgtgactaatcatctgatagcgtctacctgtgaaataatggcgtacggtatgccatacgcaaagatcggacagtatttgataggagaaattaattatgaaaagatctgtaatggattcgatgacttttattcaaattatgagatgccatgcggcactatcgctgtcacggattgcgcagaattggatcatttggcaactataatgaaggacataaatagccaatatacatttgatacgacattaaccgggtcactgcaaagattagacggctattctcctgttatattctttgattgcggagattatgtatcaaagttatgttccaaccaggagttactggctcaattcaacgaacaacttaaccgcactgttccattcaaaagaaatacagattatttctattctatgagtagaggaaaggtaaaaatagaaactttctccggtatcaccatttccgatcccagtactaatgacctcgcttccgcaaaagaaaaaacagcatggtatgcagctactcattaaatctattaaaagagagattttctaatttgtagatattcaagaacaacagctctatacatcttataaaaaatcatgagaaatatattaatcatcggtgctaacggattcaccggacgccaattactgaaggatttatctgcccataaacaatataatgtgaccggctgttccctgcactcggatatctttccagctttagagaatacaaagaagtatcgtttcattgaagttgatatacggaatgaagcgtccgtaaaagagttgttcaaagcaatttgtccggatgtagttatcaactgttccgctttatctgttcccgattattgtgaaacacaccatgaagaggcttacctcataaacgttaccgcggtagaacaactggcacacctttgcaaagaataccaaagccgtttcatccatttatccactgatttcgtatttgacggaaagataaatgagagaaccggacagctatatacagaaaaaatactccccgctcctgtcaactattacggattcaccaaatggaaaggagaagaaaaagttgccgatatttgtagtaattatgccattgcacgtgtagagattgtgtatggaaaagcactgcccggacagcatggaaatatcgttcaattagtaatgaaccgtttgaaagccggacaagagattcgtgttgtatccgaccaatggcgcacgccaacttttgtaggagatctatcagacgggatacaacgcctgatagaaaatacggccaacggaatctttcatatctgtggtgacgaatgtttgactattgcagaaatagcttatcaggtagcagactacatgaaattaaaccgcgcgctcattcattctgttacgacagaagaaatgcaagaatccactccccgcccgcgttttagcggaatgagtatcgagaaagcacgaacaatactcggatacaatccgcgaaaactaaaggaagtccttctggattggaacagcatataattattgcatatttattttgaaaatatacaaaaagttcatatctttgcaccaaaattaagaagaccaatgatgaatcagagattacaactacataacactgcttactttcttgcggaaatccccaatttctgtaagtcatgttgcgtgcacgtacattggttcagtggattcatctaaattcccctttctttgattataggagctacctgctgattcactctgttgctcacaagtagcatttatcctgactttcaataagataaattatctttttggagaattattcgtgtggcttattcaaatgtataacctgacctaaatatatacaatatgttttctattatatctaccatgtttctaggaatcggaatcggctatgtattgcgtaactggactattttacaaaagacagaaaagacgatttctcttacaatattcctcttactctttatacttggcgtatctatcggctctaatagtctgatagtaaacaatcttggtaagttcggtaaacaagcaatcattcttgccatatcgggtgtattgggaagcttgattgctgcccggctggttttacaactattcttcaagaaaggaggcgaacaatgaaaggaagtctgattgtaatattattcttttgtgtaggctgtatcatgggagctctcaataagtttcaatttgacacgcatactatttctatgtacatactatatgcgctaatgcttcaagtaggagttagcatcggttccaacaaaaatctgaaaacaatcatttcacacctgcatcccaagatgttactaattccgttgggaactatcatcggaacattattattctctgctctggcaagcatactggtaagtcaatggagcgtgttcgactgtatggcagtaggaagcggatttgcctactattcactctcttccattcttatcacccagttcaaagaaccgtctatcggactgcaacttgccacagaactaggcacaatcgccctactgactaatatcttccgtgaaatgatggcacttctcggcactccgcttatcaaaaagtatttcgggaaattggctcctatctctgcggcaggagtcaattccatggatgtattattgccttctatcagcagatattcgggaaaagaaatgattccgattgctatcctacacggcattctcattgatatgagtgttccggtattcgtttctttcttctgcaaattctaagagcttcaacgcctagcatcatcggctgcgaatacaaatctgatatcggcataggagacctcgtctcctaacgccgcttttattcctgccactccggaattctcgttcttttgctgataccgacgaatcttctctatcttttctacagctactacttgctccaatttaatctttctcatacgaacataatgttctaagtgcgtagcaattgttcccgtcaccaaatcacgtgatttagctatctcctccatactcattcccttacaaaacatctcatagctcatctgtttcgtatctttcttcggttcctttttttctcccctcttacttttttccggaagaaatatctctttgatttccggtcgtttcacttgattctccctcatatacttacggacaatccccaaaatttcaagtccatatttctccactcctttcgctccaaaataaggtacagcttccaaagcttgcggagtatctggcaaaagatttacaatgcccattaatgctttctgttgcataatgacataagcaggcatattggtttcacgcgtcttttccgttctccattccgataaagtgcgataaagctccggatgcagaatatccgtaggaacttctacttttacttttgtaaaactactacgtgtacgttctacccgttcttttttctctctcaatgttttagcggtaggagaaggagaagaagagttgtcctcaagacttaacatcaccttagctttcaatttcaaatattcagcaacaataaaaggttgcacacacatagctttcaataaggactctttaatccacaatgcatcatccaacgcttgcaaacgttcattcagttgtttcctcaactccctattatcaagaggtatattagtctttgcaaacaaaacacgaataggttccaactctttatgaaaatacaccgcaccggaacgaatccgttcttgcaactcctggtccgaagcataatcttcactctcattaatcaaacgtgtatactgattgcggaaacggtgggcaacttccactatcttttccttaatatgaggctccaatagcttatattcggtaagtaatttagggtaaagtttatacaaatcttcatccagcatacgaagtaaccgtttataagcctgctcgagggaatagaagttaaacaaatcactcaacaaatcgaagaaataagccttctgcatatcacttagctgcttgtttcccggtttattccgttccacctcttttgtgaagttatcaaccacactgtcactaataatagcctccttacgcaatggagactccaataccaagccctccaaagtcttacaacgactcaaagctacatatgtctgtccatgcgcaaaggaattgcgtgcatcaataattgcacgttcaaatgtcaatccctgactcttatgtatcgtgatagcccatgccaatcgaataggatattgacggaatgttccttctatcacctcagtgatttccttcgtttcctcatttaacacatacttatagtttccccattcctccggcaacaacagaaaatcctcctcactccctttttctttcacatatatctcagaatcattaacggctaccacctctccgatcataccattataataccgtttttccaaagaaacatcatttttgagaaacatgatctgggcaccctctttaatagtgagaatttcatctgcgggatatgtatattcaggaaaagtccccgtcacttcagctcgaaaatgataaggctttcccggtagagaagccaattcacgatcatttacttgctgtgcttgattgttatgtgttgtcaaacggatatatccttcttctttgggcggttggaagccttgctgatatcgccgattcaactcattcaacacttcatcatctgctttgttctcacgtattttattcaacagagaaagaaaaaaagtatcgttctgacggtataccttttccagttcaattgtcatataggtcgtttctctcaatgcacggctggcaaaaaaataaggcgtttcgtaataattcctcaacaaactccattcgctgtccctcacaacaggagctaactgctgcaaatctccaatcatcaacagttgtacccctccaaaaggcttttcgcgattacgataacgacgtaaagtcgcatctactgcgtctagcaaatccgcacgtaccatactgatttcatcaatcactaataaatccatgcttcggataatgttacgtttctcttgactgtatcggtattgtatttgcgcagagttaaaagtcgtttccggcacaaatggagcaaaagatatctggaaaaaagaatgaatcgtcacccctccggcgttaattgctgcaatacccgtcggagccaatacgaccatgcgtttgggggtatgctctctcaatcgttttagaaatgtagtttttccggttccggcttttccggtaagaaacaggtgtgtgcctgtattttcaatgaactgccaagcaagttgtagttcaggattattttccatgaaagtatattattttgtgcaaaggtacggaaaactatatagagattgaaataaaagtactaaacttttccgcataaaatagtcaaatgagaatcagacaaaaagtcccggctgtttttcccgctagaaagcaaccgggacgacggatcaaattagaacactaagtgatgtgctattatgtccgaaaactacttcgtatatttgttttgcttgaatataaataaaaattcaagactatttccaacgcaaatatatatatataaattcccgtttttaagtttcaccttaaaaacgggatattgaatcaaaaaataatgttattaattgtcgtaattactgcatcgaaccacccacaatatccagcaattcgttcgtaatcgcctgttggcgactcttgttatattgcttggtaaggtcttgaatcaattcgttggcattgtccgtagctacttgcattgctaatgtacgtgctgcgtgctcggaagcattagaatccacagcagcagtaaagagcttctggcttaatacagtaggtatcaagtcggcaatcaattgctcagcagaaggttctactatatagtcattcacaacttcacgctcttcttctttctgtttttccagttctttaccttcttctactgcacgtgtaaggtcaataggcagataagtctcacgaagtagaatctgcacacccattgatttaaaatgatgataaatcaattccacacggtcaatttctcccgccacatacattttcattagaagatccgccagctcggaagcttcttgataagttggtttatcggagagtgtcggaggtatttcccccggctggaatcccattctcttcacagcttcctccaccttctttcctatgggaaagatcaaaatattatcctgtcccagcgtacggtattcgctgacagtttgcaataacatctttatgacatttgcattaaaagcgccacaaagtgatgtattcgaagaaaaagcaataatcgccacacgcttcacttcccgtgctcgtatgtaaggagactctatcggaagatcagcgctcaaaaagttagtcagaatcttgttcaacttcttctgatagggcaacatattctcaatggctccttgtgccttatgtagtttggcagaagccaccatcttcattgctgaagtgatttttcgggtacttttgaccgaatttattctggtttttacttctttcagtgaagccatagttttcttgaattacaaatattgtttagcgaccatagcagcagtttcttcaatagccttagtcacattatcatcaataacacccgttctcaatacatccaacacatcctcctgatgattcaattgcagagactcgatgaaactgcgttcaaaatcctgcacgttgttcaatggcacatcacggagcaaaccatgtgtaccacaatagaggatagcaatctgttgttccacaggcatcggactgtattgcggctgaatcagcaactgcgcattcttacgccctttgtcaattgtcaatgccgtaatcgggtccatatcactgctgaacttggagaatgcttccaattcacgatactgtgcctggtctatcttcaatgttcctgccacttttttcatcgccttaatctgagcattaccacctacacgggatacagagataccgacattgatagccgggcggacaccctgattgaacaagtccgtttcgaggaatatctgtccgtcagtgatagaaatcacgttcgttggaatataggccgaaacgtctcctgcctgcgtctcaatgataggcaaggcagtcagtgaaccaccccctttcacaatacctttcaggctttcgggaaggtcattcatctcgcgcgccacttcctcctggttgataatcttagccgcacgttccaacaagcgggaatgcaggtagaagatatcacccggataagcctcacgtccggacggacggcgaaggatcaatgagacctcacgataggcaaccgcctgcttggaaaggtcatcataaaccaccagcgcgtgacggccggtatcacggaaatattcgccgatagcagcccctgcaaacggcgcgtaatactgtaatgcagccggatcgccagccgtggcagctaccacaacggtataatccatagcaccatactcacggagcgtatttacaatagaagccacggtagaacctttttgaccgatagccacataaatacaatatacaggatcccctgccaggaagttggtacgttggttgataatcgtatcaatcgcaatggccgtctttcctgtctgacggtcaccgataatcagctcacgttgtccacgcccaataggaatcatggcatccacagctttcagtcctgtctgcaacggctggttgacaggctgacggaagattactcccggcgctttgcgttccaacggcatttcatacaaatcaccaccaattaagcctttaccgtcgagcggttcacccagcgggtcaatgacacgccccaacatactttctcctacgcggatagaagcaatatgcttggtacgcttcacaataaagccttccttgattctgttagtcggtcccaacaacacagcacccacgttgtcctcttcaaggttcatcacgatagccttaatgccgttgtcaaactccagtaactcgttagcctcggcattccgcagtccatagatacgcaccacaccatcgctcacctgaagcaccgtaccgatttcgtcaagctgcacatgggtattaataccttcgagctgtttacgcaatatatcggaaacctcgcttactttaatattttcagacattatacaattctcctattcttatcaataaactgttgttttactcgcttcaactgcgtagcaatgcttgcatccagtcgataatcattaatatcgaagatgaatccgccctcgatagacggatctaccacagtctccagttccatttgcgcatgcaggatatgcgctgctgcggagcggatacggtcttccgtctccttgtccacaggaacagccgtaatcagtttgcctaccccgatatgctttagtttccggtaaagatccagatacatcaggctgataaactgtaaatatccctcacgcctgtttcgcagtaccaaagtaataaaatggacaaactctctggtggatttaccgttgccatcggcagccgtacataccagcgccaatttctctttggttgagataacagggttatccagtgcttcacgcaaacccggttgggcgcaaaagcaataagacagtgtgaggaactcttggtagagcttgtcctccactcctttctcctgtgcgtattcaatcatcgctttggcatatcgcattgagagtattccgacttccattttccttagttcttattaggggttaatacttcatccagcatacggtcaatcatgcccatttgagcttctttgtcctgaagactcttacggagcactttttcggcaatatcgacagaaagcacagccacctgacgacggatgtcgcggatagcttcgtctttctccacctggatttgttgtctcaccgcatccagttccttctgtgcggctatctcggcttgcttacgggcctcgtgaacaatcttgtcacgttcttccattgcttccttcaagatgcgtccttgttccttgttggcggcagccacaagcgcatcgccctcctgctttagtttggagagctgtgcgttggcttctcttgccacctccaaagactggtcgatatagactttacggtcttccaccatcctaatgatgatagggaaaccgtattttgccaatatcacaaacacaatcccgaatgcgacaaacatccagaacaacaggccactatcaggtaatagtaatgacatttcttgtaatttagaatgatgaatattgatttacagtttgtcggtattccacctgcttagaggaagaacaccaacagacatactactaccgccaacaaagctacaccttcaatcaaggctgccgcgataatcatattcatacgaatgtcacctgatgcttccggctgccgcgcaatagcttccatagccgaaccaccaatcttaccaatacccaaacctgctccgattactgcaagacctgcaccgatagctgcacctaatttacttactcctactgctgctgcagtggcttgtaacaatactgatagtaacataattttcagttttaaaatggtttatattttttatttgctctcttatctaattctcttttatttttcttccgccttcaccttcgcgccttcttgtgccagtccgataaacactgccgaaagcattgtaaacacgtatgcctggatgaaagctaccaacagttcaagcgcattcataaagatgttgaacagtacggaagccacggtcagtgtgccgttcagtgcgggccccatacttgcagagatgaaaatcaggcaagtaagcaccagcattgccatgtgtcctgccaacatattggcgaaaagacgaatcatcaatgcaaacggtttcgtgaagatcccgaaaaactcgatgaaaggcatcatcggcacaggaactttcagccaccagggtacatccggccagaaaatatctttccaataatgtttggttccgaaaatattaaccgcaaggaacgtacagatagccagtaccattgtgatcgcaatatttcccgtcacattcgccccaccgggaaagaatgggatcaatcccattatattgttgacaaagatgaaaaaaaacgctgtcagcagatatggagcgaatttccgataattgggaccgacacaactcttgatgatatcatcgttcaccatcataataaacatctccatgaatccgatgaatcctcccggtgccaacgctccgcgaggacgttttcgataccagtgggctacactcaatacaatcaccagcaacagcacactgttgaacagcaaagcaaatgtcacctttgtgatagaaatgtcccacggacgcacttgctctccggctgcattatactctaccagtttaccttcgtatttacttccttcgggagcgatggaaagcccttcataactacccccgttctcttcaagacgcgaagatagaaaagtatgccaacctgtagtactactataaacaataataggtaatggtatagtaatgtgtgttttaccccacgtcgtaatatgccattcgtatgagtcgccgatatgcccgaacacgatctccttcacatcaaccgtattctctttttcttctttagaagtcatctcatcctgcatcttcggagccgcttcttcctgttcctgtgcaaaaacagggaagccggctgccaacagacagagcagcaccaacggggttaatatgttacgcaactgtttcatttttattcttatttttctttttccgtttcaggttcacttcaaacgagaagaagaaccatgtttcgtatatcagatacagcaaatagaacgagataaacgtcagcaagaaagctttagcttcttcacgcacggcaaggcaataaatcaagactagaattatcgaaagaatcatctttaccatttttattgccaaatacagcagtaacatcttttgcggagcatgctgccgacacgcatcgaacatatagatactgaacaaaccaaacagatagaaatatgtcggaataaacggatatcctccgaaataatgtcccggtagggcaacgtgtaaaatcactgcaccgactcctgcacttagaattgcaaataaagtgttcaagccgataaaattccgtttagttttactaatgttcatcatgtcactgtgtttttctactgtattttctaaatctcgttttttccaattcaactatatttcaggaggtccgcctacgaaacgcaggcagaaaccgtcccgtcactcaattccacaaaaccaccctgaatatcaagtgtatgctcctccccgtccaacgtggtataacttaatgttcccgctttcaatgacgagacgataggcgcatgtccaggcagaatggaaaacgacccgatcgtacccggcaatgtgactatcttcacatctccgtcgaatacgctcttttcaggcgacactatactcaaatgcagttctttcatcgcaacgttttttatttcttcgcttgttccaacaatttcttacctttctccatagcttcctcaatcgtacctacattcaagaacgcctgttcgggaagattatccacctcaccatccagaatcattctaaatcccttgattgtatcctcaatggaaaccattactcccggaacacccgtgaactgttcggcaacggcaaacggctgcgaaaggaaacgctgcacacggcgggcacggttcaccaccgtcttatcctcctccgaaagctcctccataccaagaatagaaatgatatcttgtaattccttgttacgttgtagaatctgtttcacacgctgcgccgtatcatagtgttcctgcccaacgatgtgtggatcaagaatacgagaagtagacgccaacgggtccacagccggatagattcccaactccgtaatcttacggtcaagtacagtagtcgcatccaagtggctgaaagtagttgcaggagccgggtcagtcaagtcgtcggcaggcacatacaccgcctgtacggaagtgatagatcctttccgagtggaagtgatacgttcttgcatcgcacccatttccgtagcaagagtaggttgataacccacggcggaaggcatacgccccagcaatgccgagacttccgaacccgcttgcgtgaaacggaagatattgtcaataaagaacaaaatatcgcgtttttcaccttcacttccggcatcacggaaagattccgcaaccgtcagtccggacaatgccacagaggcacgtgcacccggaggctcgttcatctggccgaatatcagagatacctgcgacttttccaattcgttataatcaactttggaaaggtcccaatcccctttctccatactttctttgaatgcttcgccatagcgaataacacccgactcaatcatttcacgaagcaagtcgttaccttcacgcgtacgctcacctactccggcaaatacagagaatccattatgtttcttggcaatgttattgataagttcctgaatcaatacggtttttccgactcccgcaccaccgaacagaccgatcttaccacctttggcatacggttcgagcaagtcgatcaccttgatacccgtaaagagtacctcctgcacggtagtcaaatcttcgaatttgggaggatcgcggtgaatggaatatgcacctttccggtcgagttccttcataccgtcaatagaatcaccgaccacattcatcagtcgccctttaatttgttcaccaatcggcattgttatcggacctccggtagggcgcactttcatgcctctctgaagtccgtcggtactatccatagccacggtgcgaaccgtattttcaccaatgtgttgctgtacttctacaatcagtattttgccgtttggcctttttatctccagtgcatcatgtatacttggtaacatcacttctgcatctgtaccttcaaagtacacatcgaccacagggccgatcacctgggatatatgtccgataatctgtgacataagcaatcttttttatattattctttttctttcctattgaatcttaaatagtatgacaaggaacgaatgcttcgcgctttatctgtttttactattataataacagctaagttccacttttgttcatctatattttatttctgataaactatcacctaaagaaatagttatataaacaactgcgcaaatgtagaaacaaatccgtgagattgttctttcttttttaaaatttgtcgttcgataacacttgttaggccaataaagactacaaatagaccaaaatagagtttataatattacaaatagtcagcaaaaagtttctgttacttataaaatagcaactgtatatgtttgattctaataagttttcagactcattgtttataatcagaacattagcaaaaaaacaaaatagtagcaccggcaactagttttgtgttcggacacatccgaagatacctaccgatttaaaaataaaaactccaactcgccggaatttataaatccggtgagttggagcttttatattaaatatcgatcggatatttaatatacttccaccttttcagctattctctttgccttatcgcgcaaagcgtccagatcggagtcgagcggagcataacacagtaccactcccatacgacggttgacgcgggtaaacggcttaccgaatatacgcaggtaagtatcttcctctttagtgacttcctccattccgcggtattgaggacgttcttggctggctatcggagaaaggataacggcactcgctcctatcctctcttgcttaatgcccggaataggaagtccaagcacagcacgcaaatgaagttcgaactcattcaaattctgcgttcctgccaatgtcaccataccggtgtcatgcggacggggggaaagttcggagaagtaaacgccattctcgtggctcaagaagaattcaactccccaaagtccggctcccgtcaaagcgcgggtcactttctctgccatttcctccgcttctttcaggtgagcagggtcaatgtgcgcaggctggaaactttcacggtaatcgcctcctttctgcacgtggccgataggcggacagaacaacgtgggaccgttcttttgagtaaccgtcaatagtgttatttcactgtcgaacttaataaattcctcaataatgagctcgcggatatcaccacggctaccactgcatccatactcccaagcgtgttcaagttcgtcggcacttttcacaagtgactgtcccttaccggaagaagacatcaacggtttcaccacacaagggaaacctattttagcagcggcagctttcagttcgtctaatgtcttagcgtaaaaatatctggcagttttcagtccgagttctttagcagcaagatcacgaatggctttacgattcatcgtgaagttaacggcacgggcactgggaaccacctggataccttccttttcaaaatcatacagacgttccgtacggattgcttcaatctccggaacgataatgtccggctgatgtttcttaacgatacgctccagttcttcgccgttcagcatatcgaatacttcacattcgtcggctacttgcatagcaggcgctccggcatacgagtcacaagcaataatgtgctgacctttacgctgggcagaaattacaaactcttttcctaattccccggaaccgagcaacaatattttcttcattattttgagtgttttatgttaatgatgcaaaattagtacatttcgatgaaatatggcttttttagtgacgtacttttggatatttattgtgaaaacggaaacctaagccgagcatcagataattaggggtctggaagttctgaagattataaccgatgtggaggaaagtactgcgggtaattcctattttcagggctaatatctgataaagcccccgcaagtcaccacgaccgagcacattggctccgatgcctacgccgattgtaaaatatggcatcacatactctgcacgtcccgacacgccgagtgatagttgatgctggatgcccggtttcagaaattgacgtggaggaggcgtgccgtttccattcgaatcgacaatataatcttccatataggtatatacattggcactaccgtcgtaaactccgtcgagcgaggcaccaacacgaaatttataaccgaggttgtacatcggcgcgaagttgaatcctgccaccggataactaccgggcgaggcaatctgtctcccgtctcctatatataccccctttcgccgccatgagccgaataataccagatcataacttatgtgacgcggaaagcggggaatagccggccgaagcagagactttgtaagttcttcttctgtacggttaaagttatacaccaatccgattttggctccggtggtatttacccctgcattcgggaatttggtattgccattagagaaatgagtgaaatcaccgccaatgattaagtcgaaataacgggaaaatgcccagttcagatagataccggcattaatataggcattcattcgcgaaccgactgcaccattataggaattataatcattatcatacggtttccaaccggcggacagaccgaagttccattcgtagttgagcgaaagacagggattaaaccgggcaatccgcgccccctgaaacacataaaatgagataggatctccaagttgttttttatctccgaaggtagtggcggacaagccgaatccctgataagcaccaccataaatacggtcggcacaggtgttgggacggaattggaatgaatatttcaaatgagcggcaaaagaggtctgaatgggttgccagcgttcgttttctccctgcaagaagggattggtaggaaacacatattgcggacggacttccacccccagacgatgaataaagcgatgaggagtatgcacagagagcgtatcaaatccatacctcgagaaactgctttgccggatttcataaatatcattctgccgaacctcctgtgcattcaaggaaatccccgaaaaaaatagtattacgcaaagaatgatgacctcccactttaatacctttggtctcatatatggtttgtttagtctttataaattggtgcgaacctacaaatcaagagattcgatgaattttgccacatgataaccgtccattaacccatggtgacaagtgacggaaataggtaacatcaacttctccccttcccgaaagtattttcctgtggatattttcggtacgctgtcacccgaacgcatgttcgtggggtgcttcatgtctgtaaaggtgagccagggcactgccgaataatgaatggcattgggatgaaaagttccttccttattcaatccggtagtagtttgcagtcgttccatttcagctttcgctttgaggataaaggtcagttcatcgggatcgtattcaaaggaagcgaatgagaatgtatggtcggcacgacctacggtagcttcgggcaggagactgtcataacatacaactttttctccttcgatacgataacggaactcttctactttggcggcagccgtgatgatacgatgcaggagcaaaagggaaaaggaaacgcctttatttttggcttcccggtaagcacgggtacagtctacattgaccgttacaccgaaaaaaggatcgtcaaaggcactaaaatgttcaaaatgttcttttctgttccaagtagcaatatcaataatcttctcaatctgattcatctaaacactctttttataggtctgtggcatataaacgaccgctcaatcctaaattatcaagcggtcgctttctctaatatctataattggctgtaattatcatcttgttttttcaacatctgattactggtgttgctcacgcaacaagtcatttacagtctttaccggattaaaggtagtaagcggtacttctacgaataccgtattccagtcactcatggcaccattccataagccgggaagctcaagagccttcaagtctttaccattcttcgatttatatgaaatgaaaccggttgctttatctacaaatctcactaagtcaaacttatgtcctttgtaatcacgaacagcacaaaccaagtctaccggattaaagtgagttcccttctcaaacatttccttttttgcagggtcattcatgtcaatctgagaactttcgaggatttgcagggagattgttccgtcgctattgtatgccaggaacggaccaccacccggttcgcctacgttcttcaccataccgcagacacgcatcggacggttcaacttctgtttcagatagatcaccaactcggcgtcttcgagatttttcacttcgggattcttgcagaaaagttgtttttgcaggaactgaagaatttccataacttgctcatgcgtatattttccgctatcaagcaactcaagatactcgaaagcttttttctgcaaagttaccagtacaccggcaatcagtttcttataagtcactgtgtcagctttcagtttatcgggcactacattgtcgatattcttgataaagataatatcggcgtcaaggtcattgaggttctcgattagcgcaccgtgtcctcccgggcggaacaacagtttaccgttatcacggaacggttggttgtccatatcggctgcaatagtgtccgtgctcggtttctgctcggagaaggtgatgtagtaatccactccgtagcgtttcgcaaattctccggtcttttcttccactagtttcttgaatagttcgcgatgttccgtagatacagtgaaatgtacattgaccttgccactttttccggcagcatacatagcaccttcagcaagatgttcttcgagcggggtacgcgggccttcgggatatttgtggaatttaagcagccctttcggaagtgcaccgtaattcaatccggccgtttcgagcaatgcggctaccacagctttataattgccttcttccagtagtcccggtatgtcttttccggcagtacgctggcaggctacattcaaatcgtcatagaaagcaaaattcctgataccgtcaaaaaatgcctgttcgaactttgtagtgggcttgtcatattcggcagacagaaactcgaacaagttcttgaacatacgactcgcagcacccgaggcaggaacgaatttcacaatagtcttatctgtgttcttatatgcgtcccaagcagctaaataagctttttgttcttctgcatcgggagctaagatacctttctctatggaagcagccgcatccagtttcaaaaaagggaaacccgtctggaggcatgctagttgctctgctatttgcgcttccgtgatgccttttttggcaagcaactctttgtcctgtgtcgttatcatactatctattttaattaattgatgcccaaaaatacaaaatgttatttacttcttaccgaataaccaagaaaaaaagtaattttacgtcgaattaacaagattgaatatggacgacttttttacatcagaggaaaaaaaggagcttttttcactctaccggcatttaatgcaatccgccggagacagtatttcctggagggattgccaaaagttaaagaaacatctaatcaaagccgcccaatgtaacgggttgcaacgcaataacttcgggatgaatcccgtcatcagagatttacaaacggctgttatcgtagccgaggaaatcggaatgaaaggttcgtgccttatcggaatcatgctgcatgaaattgtgaaagcacatatcctgagcattgaggacgtgaacatcgaatacggggaagatgtaggcagtatcatcaaaggactggtgaaaacgaatgaactgtactccaagagtccggctatcgaatcggagaatttccgcaaccttctcctgtcatttgccgaagatatgcgtgtgatcctgattatgattgccgaccgtgtgaacgtaatgcgccagattaaggataccggaaacgaggaagaccgcgtcaaggttgcgaatgaggcagcttacttatatgctccactggcacacaagctggggctttacaagctaaagtcggagctggaagacttatcattgaagtacacccaacgggaaacgtattattatataaaggagaagctgaacgagacgaaagcttcccgcgacaaatatattgccgccttcatcgaaccgataaaaaagaaggtcgcggaagccggactgacgttcgacattaagggacgcaccaagtcgatacattctatatggaacaagattcagaagcagaagactccgtttgaagggatttatgacttgttcgctattcgtattatcctggattccgatccggaacccgctaaggaaaagcaggagtgctggcaggtgtattctattgtgacggatatgtaccaaccgaacccgaagcgtctgcgcgactggctctcgattccgaaaagtaatggttatgagtcgttgcacatcaccgtcatgggtccggaaggaaaatgggtggaggtacagatccgtacccgccgaatggacgaaatcgcagagcggggtttggccgcccactggagatataaaggtatcaaaggcgagacgggactggacgaatggctgacttccgtcagggaggcactggaaaacgccgacaacgattcgatgaaggttatggaccagtttaaaatggacctttacgaagacgaggtatttgtatttaccccgaaaggggatttattcaaacttgccaaaggagctactgtactcgattttgcatttcatattcacagtaagctgggatgcaaatgcatcggcgccaaagtgaacggcaaaaatgtacagttgaaacagaagcttaacagcggcgatcaggtggaaatcatgacatcgaacacccagacaccaaaacaggactggctgaacatcgtgacgacctctaaagcacgcaccaagatacggcaggcactcaaagaaatggtggcacgccagcacgctttcgctaaagagacgctggaacgaaagttcaaaaaccgcaaactggaatatgatgaagcgacaatgatgcgccttatcaagcgtctgggattcaaaaatgtgacggagttttatcagaaaatagcggacggagcgctggatgtcaacgagacgctggataaatatgtcgaacagcagaaacgggacaacgacacgcatgatgaaattatttaccgtagcgccgagggttacaatttgcaagccgcacaggaggaatcaacatccaaagaggatgtgcttgtgatcgaccagaacctgaaaggactggaatttaaactggcaaaatgttgtaatcctatttacggagatgatgtgttcggattcgtgacagtgagcggaggtatcaagattcaccgggcagactgtccgaatgctacgcaaatgcgcgagcgtttcggctaccggattgtgaaagcacgttgggcgggtaagtcggtaggtacgcaatatcctattacgctgcgtgttgtagggcatgatgatatcggtatcgtaacaaatatcacttctatcatttccaaagagaatggtatcacgctgcgttctatcgggattgattccaacgacgggttgttctccggaacgttgactgtcatggtaggtgacaccggacatctggaagctcttatcaagaagctacggacggtaaagggagtaaaacaagtaagccggaattaagaaccgaatctatataaaaatagtgacgctatccacaagtaatagcgtcactatttttatatcatagcgtcataatgccatagggataatgaggccttatctcactttctttttgatataatatggatacgttatcagcacaaagaacagtaaggcgaccgaagcaacgatttgtcctatgtaaaacatttgatcggtatccgtatccatatagcacgcaacagcaattccaagtgtaatgccggcttcaccagccaacagatgagttgtattggctgtaccccgttgacaatggtgagacagttttacgaacatcaccagaaattccggcattatcagtcctaatcccaatcccagcagaacggaagaaataccgctagaataacctgctttcaacaggcagattgccagtatctccaatccgagtcccataatcaccaacctcagcgttttctctttcaggataaacaagcgagcgataaccagggaagccagatagcccattcccactccggcgaaaaagggcatagatacacccgtatctcccagtacgatatcgttgagggaaggatgtacaagcggaatcagtaaccccggtataaacgttatcaggatcaggtttatggcaggaacccacccgcgaagcagcagaaagcggtcgaatgaatacagcttagtgacaaacggtgcacgaaagggaacataaacaccggctactgtcagaatccccaaagcaccagtggtaacggataccgttagcaaagtcttaaatgcatagtgttggtcgaaccagacgccgaggataattccgagaatcattcccagtcgtgctatccatgaaaaactgacgtttccggcactacgaagcgtagagttcgtaatgtcaatggctagcgtaattcctgcggtagtagcgataccgaatgccagtccctgcacggtgctcagcaggataagttccgtaatgttcgtcacaaaagcataacctaccgttgccgctaccataaggacaaaagaaaacaggcatacattcttacgtttgtatgcatctaccagataggcatggaaaggaccgataagaaacattcccagcgtgaaaaagagaaagataacccctgtctccgtcaccggcaatccgagacgttccgacatttcaatgggaagcaccggaaacaacacgtacaaggatataaacaacagcaaattagctacacatatccgcataaaatgtactgtccacaatttaactgccatatattatcttaatattgttccttctcgttggggaagtaacaattcttcacgtcggatacgtaacggctgatcgcgtcggtcattaccgtgtataaatcggcataacggcgaaggaaacgcggacggaatccgttgttcatcccaagcatatcctgaataaccaatacctgaccgtctacatgaccaccggcaccaataccgataatagggattgtcagttcggcagctacacgttcggcaagagtagcgggaatcttttcgagaacaatggcgaaacaacccgcttcttcaagcagatgagcgtcacgaatcagtttgtccgcttcagcatcgtccttggcacgcacagtataggttccgtatttattgattgactgcggcattagtcccaagtgtcccatgaccggaatgcctgcactgataatacgtttcaccgtgtcgatgatttcttctccaccttccagtttcaatgcgtctgcatggctttctttcataatacggatagcagaagcaaggccttccatttcatttccctgataggaaccgaaaggcatatcgactaccaccatagcacgttttactccgcgaaccacggatttagcatgataaatcatctggtcgagagtgataggcaatgtagtcacattacccgccattacattagaagcggagtcgcctacaaggattacatccattcccgcaccgtctacaatttgtgccatagtgtaatcatacgcagtaagcatagatattttttcgcctctctgtttcatttcaaccaggcgatgagtagtcacttttcttgtatcatctgatatataaccagccatgtcttttaaattttaaattaaaaactaaagtaccataatagcgtcggacgctatcaaaaattgtggcaaagttataacatttaattcataactgggaaagaaaaacaagaaatcctttcaatcgttctctaaaattgccttgcaacgattaaaaggataaactgaaatattgtaggaaatagcgttaacgttgcatcgtaagcaatttttcgtaggtcatttccgcaaagtcatctattatatagtgtgcttttccggtaatggcctttcgtgtgttagtagtggcgagaccgataacggtagcaccggatgtcattccggcttgcaacccgtggaaagagtcttcaaatacgtaggtgttttcgggagtcgcactgaatacttccatacccaacaggaaacaatcgggagcaggcttggaatgggcgaacatctcgccggtcaggattcggtctaccattcctttaaattcggggtgagcgttataaacattctgcatcttatcttcattggaactggtcaccaccgctatctttgcaccatgacggcgaaggtcagcgataaaagcttctacaccgggaatatatttgtaggacatcgctttctcaaagagattgaggcgggcggttatttcttcctgagcttccggtttgtccgagaaatatttctcatagatttgtgtcaatgtttgccctttaatacagcggccgaagtcttcttcccccaggtacttatgcccttgctcgtcccaaaagacagtatactgggtttcggtgtccataatcacaccgtcaaaatcgaataatactgcaattatttttgttgtatccatagctaaactttctttttaccttaaacgttaaaccttgtgtattgacttgtgcaaagttccgaataatcatcgaatcaggcaaattattcgtacctttgcactacttaaaaaaacgtaactttcgtttttcatccaacattaaagattcagacgcatgagtaaaaacgacccgcatatattaggaaaagagagtatcggcaaactgctgttgcagtattctatccctgccattatcgggatgacaattacttctatctacaatattattgacagcatattcatcgggcacggtgtaggcgccatggctatcgccggactggcggtgagtttccctctgatgaatctggtggttgccttctgtacacttgtttctgccggaggttccacgctcgcatctatccggctagggcagaaagatatgaaaggggctacggaaatcctgtcgcacacgttaatgctttgtatcaccaattctttctttttcggaatattgtcttttatcttcctcgatgatatactggtctttttcggtgccagcgcagatacgctgccttatgcccgcagctttatgcaggttattttattgggaacaccgatcacgtatacgatgatcgggctgaataacgtgatgcgtgccaccggatatccgaagaaggctatgattacttccatggcaacggtgctctccaacatcatcctcgctcctatctttatctttcactttgaatggggaatgcggggagctgccacggcaacagtcatttcacagttgatcggtatggtgtgggtagtgagccatttcttcaagcaggacagtacggtacattttgaagggaaggtatggaaaatgaagcgtagaatcgtcggcaatatcttcgctatcggcatgtcgccgttcctgatgaatgtatgtgcttgtgtcatagtaatcattatcaataacagtctacaaaatcatggaggcgatatggctatcggggcatatggtattatcaaccggttgctaacgctttatgtaatgattgtgctcggattaactatgggaatgcagcctattgtaggctacaacttcggagcacagaagatagaccgggtgaaacagacgttgaaactgggaattgtttcgggggtggttatcaccagtagcggattctttatctgtgaactttttccccatgcagtatcggccattttcacagacagcgatcatttgatcgatcttgccgtcgacgggcttcgcatcacggtgattatgttcccattcgtaggagcacaaattgttatcggtaacttcttccaaagcatcggcaaggctaaaataagtattttcctgtcgttgacacggcagttgctttatttgttgccttgtttgttacttttccctaattggtggggattgaaggggatctggattagtatgccggtgtcggatgcgttggcatttatcacggcggtagtcagtttaataatctatatcaagaaggtttccaaacaacatccgatagcagaataaggtagtatctaccctattctgcctattatttctattcagttttgatactctttaccggattttcattggcaatataccatgctttgagtaccacacaaagtataatcagcaattgaacaaataaggctgtacctataaaaagtaacggattccaatcaatctgttctgcaaactggtcgagccatgcccgtcctgcaaaataagacacagccgtacctatcaggatagaaatgacggaaacgcaaagaatatcgcgtgtcagtaacctcaagatgtgtgaggcttctgctccgttcaccttccggatagctatctctttgctccggcgttgagtttcatcgttcacatagccaatcagtcccatgatgacaatcagcagaatgaaagcagaagtaatccagacggaattgcggaaacgatacacatctttatatacaccttttattatatcatcaaccaagacaaagcgtaaagcgacattcgggaatgtattttccataaacttattcagacgtttcagattttcactataaggttctttcaggcgaacattgaatgcatgattcgcatgatacttctcatctccgatcagcgcaatgggagactggggtgaataaaagctagtgttgcggatatcccggaaaacacctacaatcgttcccggaacgtcattcaaccgcttccccactgcaccgtcggtccacttcatcaggcgcaccacttcttcatttaccagcagatcgtcctgctttttcaaatcagttccttctattattttgatgcccattacttcaggataattataatggcaatagttgaaattgagtgtagtaatccgtttaccctcgttattcatcagccctcgtgtccaatactcgccaagcacactattcgctgcaaccgttactccttctaccatgggttggcggcgcaattcatcctttatatgcgctaccgtctctctgggaagccaactttcggcttgagtcaaaccaggcacaacgatccccatatctcggttcataagatgactgtactgtaataaagtgaccaatagtaaccccaaaacgaaagatactcctgtaaattgcacaaatagcagagagcgtttccaacctttctttccgtcggtataccgacggaacacttgcgtgacaggaatacgtgaaaatagtcgtcccggcatgccgcccgccacgatgaaaagtacaaggatagtgagtaacggcacccataatgtttcccatgtaaaaagcgaggaaagccggacagaaagtaaatcttcaatcaagccacgtgtattgaaaatcagtaagaagctaagtaatacggagataatgacaaggactcctgtctctaccagaaacatattgaagatattggtcgaactagctccattacatttatgtacacctactcctttcgcacggcggctcaaagtggcaatggatatcaacatataattcatgattgctacaaagaaaacagcaaagccgaggaatccgtaaataaccagccgtttctgtacttcaggagaggacaaatgacgcttcaccagtgggatagcactaaattcaactttccagccgtccagatccaaagacgtatattttttaatcactcgctgaatattactgttcaccttatcaatatccgaagcatcgcgtaaacggagaaaagcataaaagacatcatttcctctccaacctgctcctccctgataaccaccgttccgatgaacagacacaacaaagtcgtgaacgagcatcgtattttccggtacgtccttatatatgccacgaatggtaaagtcatgtcgtttatctgccgaaagcacctttcctataggattttcatccccaaatattctacgggcaaagctttgagatacaaaaacgcttccgggcataatcatatctttgggggttcctttcagtaccggtatgccaaaggtctgaaagaaacaagtgtctccgtagatgtaatttatatcagatagcagtttatcttcataataaatactaaaacctgtttgaggaagtacacaactggctgtttctatttcatcgggcatatcttgcgccaaagtagctgccaccacatcaaagacggtataatcatagctattttctccatcatcccctcttgtctctcctgtactggcatttgtcatctgacaccgcacaagagccagacgttccgcttccggatagcattgttcatagctcagttcaaaggctatttgtgagaaaagcagcacaccaatggtaagacctaaagagagggatattactcttatgatattcgacccgcattcgcgtaacaatgtgcataaagtatagtagatttgtctcattgtcgatttctcatttaggctgttacactcgctacaacacttccatcgaacaaatgtacagtgcgatgagcaaaactcgcatcatgctgtgagtgagtcaccataataattgtagttccttccttattcagttctgtcagcaggttcattacttcggcaccattctttgagtcaaggttacccgtaggctcatcggcaagaattagtttaggattggtgacaaccgcacgggcgattgccacacgttgttgctgcccgccggagagttgttgcgggaagtgtttggcacggtggctgatgttcatccgtttcagaatatcttctaccattcggcgacgttcggaagattttagtcccagataagtaagcggaagttccacgttttcataaacattcaattcgtctatcagattgaaactctgaaatacaaaacctaacttacccttacgcatatgagtacgttctttctctttcagcccggcaacttcctgccccattaactgataggagccttcggtaggattatccaaaagtccgaggatattcaacaaagtggatttaccacagcccgagggtcccataatagctacgaactctccttcttttacttctagatttacatgattcaatgcaaccgtctccacttcggaagtacggaatactttactgatgttttcgatttgtatcatttttctcaattatattttaaattcattatatttcaattattcattcgctatgctgttcaccggattctcattagcaacttcccatgctttaagtattacacaaactagtatcacaactaatacaaacgctatgactccggcaaataaccaaatactcagattgacggattcactaaattgttccaaccatttcatacctatccaataggccagtcctgcaccgataagcaccgccggaagggctgtccacaatacgtttgcggaaaacaatttcaatatgccacaagtatccgcaccattcacttttcggatagcaatctctttcctgcaaaaacgaatctcgtcaccgacatatcccaacaatcccattaaagctataaagaaaatagagattgacgctaaaagtactgcattccgaaaacgtgtaatatccgtatattgctcatccagcttttgagtcagcgaataaaagataatgtcttctgttggaaaagtttccgccattaatgcattcagtttcttcaggttctcatcaaaaggctctttcaatcgtacgtaatgaagccccgggttagaatcactaccgcttcccaacagtaataccggatactgaggatgatatacactttgaacagagaaattcttcattacgccaacgattgtaacttcctttccccatatagacaactgtttccctatcggctcatccgtccatccggcccgacgtacaaactcttcattcactaaggcctcttttggagatgttacatttttgccatgtaatatctgtattttcatcataggcacaaaatcatctccgatccactcaaaccggcctttgatagtccgtccttcccccacattgaacacctctcccgaccaacttctccagatggcctgctgacctaccccatgttcctcaaccataggcaaattcataaaaaaactcttggcattttgccggttactgcccagcttcttccaacccattaccacgcgttcgggattatatcccaaatctttgttcatcgccatgtgatattggcagaatacaaccataagaaaacctaaaataaaagtcataccggcaaattggataaacaacaacggacgtttccaagatgtcttacgttctgcataacgtcgaaaaacttgcgttacaggaattgatgcgaatatgcttgccggtatggcgcccgccaagataaaaacaaccaaaagtacggtcaacggtacccaaagtgtctgccacgtaaaaagtgaacttaaacgtataccggcaatttcttccacaaactcccgaaactgaaaaatgagcaatatcgtcagcaatactgaaatgaaaagaacaagagctgtctctgtcagaaacattctaaaaatactgttatctgttgcaccacaacatttgtgtactccgatagactttgccctcctggctaaagatgaaacggcaatgagcacataatcaaaagctgcaatcaacaagattgcaatacccagcacggacatcattaatatcataagccgtactgtcggatctgccgtatgatattctaataaaggacggaaagaaaaacgatgagatttctttttattcgaggagtcagccatgtatttcttaagcatatcaggtattcgtgcttccaccgcctttatatctttagcaggatcgcgaaaacgaataatcgacatataactgatatcatatccccagcccccacgagccagattccacaacttgctcatcggtaccactacatcaaaatgtatatctgcgttttcacccatatcttcaaagacaccacgtatgctcatcggctctttgcggtcaacggataaagtcttgcctataacactttccaaactgttcccttctcttattttttccgccaacgaacgggatatgaataaaacatcaggacgggttagttcttctgccttaccgattaacagttttaaacccaatgtggaaaacaaatgttcgtcagcatatatcgtagactccgttaggcgaacatttccattataaaaaacatttgttcccatgtccctcaatatggtggcatcctccacttctttcgggaagttctcacgcatagccgctgaaaaaggaccataagtaaaaggtccatccatatatgtgacatataactgctccgactgaggacaaaaattatagtaactcaactggaaagcaacacaggaaaacaataagataccaacaaatatccccaatgtcattgagataatcttgataatattcacgcctcgttcatggagcaacgtttgaatcgtataataaaagtgtctcatcattaatttattttgttatatcttcaatttgaaaaacagaaagtatgccaaagtcatcttttcactcattatcaaccagttatactattcaacatcagatagtttttgtctaataattagacagtgatgtctaattattagacaaagatcaatagttcagttctttctcataaagaatcgaaagtagatatttccgcctctttattgttctttttttcctatttatcataagtaatcatcgttatctcatttgaaaactctatcttcgcatcaagttttcaataactaaatattttatttatgttaaacaagaatttattcactcttctgtcctgtctgcttctgaccgggtgtggtatgatcgactatcatccctatgatgtgcgtatcagtggagagacagatgtaaacgctcataacattgaacaaatagaaactgactgtaaaggtaaaaagacaatccgctttgtcactatgggcgactcacaacggtggtacgatgaaacggaggatttcgtaaaagcaatcaataagagaaatgatatcgacttcgttattcatggcggagatatgagtgacttcggagttactaaagaatttctttggcaacgggatattatgaacggattgagtgttccctatgtaaccctcataggaaaccatgattgtctgggtacgggggcagaaacgtacaaagcgatattcggtcctaccaacttctcctttattgccggtgatgtgaaattcgtttgtctcaatacgaatgcattggaatatgattactcagaacctgtaccggatttcacctttatggaaaatgaactgacaaacaggacagatgaatttaacaaaacagtcataagtatgcatgcacgaccgtatacagacgtattcaatgacaatgtagtaaaaatgttccagcattatgtcaaacaatatcccggaattcagttttgcactgccgcccatactcatcactatcgggatgatgtgatttttgatgacggcatacactatgttaccagtgacagcatggacaagcgtacttacctggtatttaccataaccccggagaaatatgaatatgaactggttaaatattaaatacatcggacgggcaggactgataattatcctgttattctttacctgtccaagttcagctacttgtaaaacagatacagttatcaatacatataagcgcgattcattatattttgcagtaaaagctgactcaattatcgcctttcatacaggagactctttgtgtactatcatcaaggcagacactgtgctacccgttatacccaaagctgtaaagagaaccggttatgacaatcgggtacatcgcttccgcaaaaactgggaacggattatcccgactcatgctaaaatccaatatgccggaaacatgggattgctctccttcggtacagggtgggattacggaaaacggaatcaatgggaaacagatatattgctcggattcatcccgaaatattcgtcgaaaaagacaaaagtgacaatgacactgaaacagaactatatgccctggagtattaatataggaaaaggattctcgacggaacctcttgcctgcggactctacctgaacactgtcttcggagatcagttctgggtaaacgaaccggaccgttatcctaaagggtattatggattttcgagcaaagtacgtattcatatttatatgggacaacgactgacttatgacattgacccgcaacgcagatttttagctaagtcggttacttttttctatgaaataagtacttgtgacctttatctggttagtgccgtacaaaacagttatctccgcccccgtgattatttgagcttatctttcggattaaagttccaatggctataaaatatttttcgtagatttggaaaatttttcaaacctcctaaaacaaaggaagtttgaaagaaaggctaaaatcgaggtaacgcagtcaaaccattttgattcttgactgccaaatctgtagtatcacaataaaaaaagaaaggacgtaaaatgaagactaaagcgatttttcttgatgtggacggaactctaatcagtttcaaaacacataaaataccacaaacaacgattgatgccctaaatcaggtacataacaatggcattaagattattatagcaacaggcagagtggcgacagaccttggcgaactggacgccatcccgtatgatgcggtcgtctcactgaacggttcccattgcctgctccgtgacggcactgaaatcacttcccgccaaatcagtcatgaagatttcagaatagtccgtaatcttgcagaaaaatatggtttccctttggcattggaagtagataaaggaatatttgtcaattatgtaaatgataccgttatagcactttccgaacttaccaatcatccgattcctctggttgtggacatagacaaggaatttaatgagtgtaagtgtcgccaactttgcatttattgtggtgaagatgtagagaaggaaattatgacgcaacttcccaacttgactgtttcgcgttggaatccgtatttcgcagatgtgaatgttgccgatacgaacaaggcttcaggaatggctgatatggcagattatttaggtttttctttggatgaaagcatggcattcggagacggtggcaacgatatacccatgcttcgtgcggcaggaaccggtattgcgatgggcggcgcatcggatttgatcaagaactatgccgactatgttacagacgatgtggacgaggacggcatttataatgccctagctcattttgggataatttaggtcaaatatttatttaaccatgacaacacagtttttctggcctgttcctatgatttttgtgctattgttccccgtattgccaatcctttcaatatagtagctccgctacatacttctttcagatgattttctgtgtcggacaggccacttccttcatgggtataaaaaggaattactatttgtcccttctcattcggcttttccagagattttttcgtaagtttgtacctgataaacttaatcgaatatgagcaaatcgggaacaatcatcattgtagacgacaacaaaggagtactgactgccgtagagatcttgctgaaaagttatttttcaaaggtcgtcacactttcttcacctgtcaccctcatcactgtgatgcaggaagaaatgccggaagtgatattgttggatatgaacttcacttcgggaatcaataccggtaatgaaggtttgttctggttgcacgagataaagaaagtacgtccggaacttcccatcgtactctttactgcatacgccgacattgaactcgctatccggggaatcaaggaaggagcgacggatttcatcgtgaaaccctggaacaaccaaaaactggtagagactttacaaaccgccgcacagtctgtgagaaacgggaaaaaaggaggagcaagaaaggaatccgccggtgtccagccgatatattggggagaaagtaaagccatgcaacaactccgaatgttgattgaaaaggttgccgttacagatgccaacatcctgattacaggtgaaaacggaacagggaaagaaattctggcacgagaaatccatgcgctttccaatcgacgacaaaaggaaatgattgccgtagatatgggagctatcactgagtcactattcgaaagtgaacttttcggccatgtgaaaggttctttcacagatgcgcataccgaccggacaggtaagttcgaagccgcagataaaagtacgttattccttgacgagataggaaacttgccctatcatctgcaagccaaactgctgactgccattcaacgaagaagcatcgtgcgagtgggaagcaatagcccgatgccgatcgacatccgcctgatttgtgccaccaaccgtaatttgcaagaaatggtagataacggagaattccgggaagatttactctatcgtatcaatacgatccatatagagataccttcgctccgggaacggaaagaagatataattcctcttgccgaaaggttcatgatccgcttctgcaagcaatacgacaaagagccgatgaaattcagttctgcggcaaaagaaaaactgtcaatacatccttggtacggaaatatccgtgagctggagcatgttattgagaaagttgtcatcattaacgatgagccgctgattcctgctgagatccttcaattatcttcccggaaaatagaatctccggaaagaaacatttccactttagaagatatggagaaacaaatgatacggaaagcattggaggcttgtgccggaaatttgtcggcagtagccacccagttaggaattacccggcagacactttataacaagatgaaaaaattcggattatgaaccggtatcttcaatatataacacggcagtactggttcagagtcgtattgacagtactcgtttgtacagttaccgtccgtttcggtatccttcaatcttatacatggtttggagtctgtatttgccttttaatcctatgcatattatggcaaatccgactttaccgtacccacgtcaaacaggtactttttatgattgatgcattggaaaataatgataattcctttcacttccctgaggaatacggtactccggaaagcaggcagatcaatcaggcactcaaccgggtgggacacattttatacaatgtaaaagcagaaacagcccaacaagagaagtattacgaattgatactcgacttcgtgagtacgggattattagtgctcaatgacaatggagctgtatatcagaagaataaagaagcactccggcttctgggactcaacatattcacacatatccgccagttaagtaaagtagacgctacactcatggaaaaaatggaaaactgccgcccaggggataaactacaagtcatgtttcataacgaacggggaacagtcaatctatccatacgtgtttcggaaattaatgttcataaagagcatttgcgtatcctggctctgaatgatatcaacatcgaactggatgaaaaagagatcgattcatggattcggttaactcgtgtactcacccatgaaattatgaactccgtcactcctatcacctcgttaagtgatacacttttgtccatggtgaaagataaagacgaagaaatcagccatggcttgcagactatcagtaccaccggcaaaggcttgctttcttttgtcgaatcttaccgaaaattcacacgtatcccgactccggagccttctttgttttatttgaaagcattcatcgaacgaatggtcgaactgacccggcaccagaatccgtgtaatcatattactttccatacagaggttattcccgccgacctgatcctccatgcagacgagaatctcatttcacaagtcgttatcaatcttctgaaaaacgcagtgcaggcaatcggcaatcagcctggcggacgcattgcgatacaggctcattgcaacgacgcggaagaagtactgattgagataaaaaacaatggccctgctatccctcctgaaattgcggaacatatattcatccctttctttacgaccaaagaaagaggaagcggaatcggactaagcatctcccgccagattatgaggctttcgggtggtagcctaacattgattccggatgataaagagactaagttcatattaaaattcaaataacagagtagcctatgatacccgtacttatcaataatccgttattccgggggataactccggaaaaactatccgccaatctggaagaaataagtttccacacccgttcttataagaaaggggaaattctggcacggcagggggatgtatgcaaccgcctcgtcattctgaccaaaggcagtgttcgcggagaaatgatagactattccggaagattaataaaggtagaagatattgccgcccccagagcgattgccccgctttttctgtttggcgaagaaaatcgttatccggtggaggtgacagccaacgaaccgacagaggttatagaaattcctaaaacaagtgttctggaattgttccgcaagaacgagcagtttctcgaaaattatatgaacctttctgccaactacgcacggactttatccgacaagctctttttcatgtctttcaagactatcaggcagaagattgcttcttatttacttcgcctatataagcagcaacaacagttacatatcaccctcgaccggtcgcaacaggaattaagtgattatttcggagtatcccgtccttcgttggcacgcgaattggcacacatgcaggaagacggattactcactgccgaccggaaacagatcactatccttcaaaaagaagagcttgtccggcttatccaatagagtttgccggtatccacaaaaaaatattcattgttgtaacattagttacagaactgcccgcaacctttgcgctacatttgcgttcattaatcaagaagactaattaaaacgtaaatgttatgagtatgttctgttatcaatgtcaagaaaccgcaatgggtacaggttgtaccttaaaaggagtatgcggtaaaacatccgaagtggctaacctgcaagacctgttactctttgtaatacgtggaattgccgtgtacaacgaacacctgcgtaaagaaggacattcctccgaagaagcggacaaatttatctatgattctctctttatcactattaccaatgccaactttgacaaagcagccattattgggaaaataaaggaaggactacgcttgaaaaaagaactgggcggtaaggtttctatcaaaaacgctcccgacgaatgtctttggaacggcaatgaagatgaatttgaagaaaaggctaaaacagtgggggtgcttcgcacaccagacgaagacatccgttcgttaaaagaactggtgcactacggactgaaaggaatggcagcctatgtagagcacgcacataacctgggttaccagtcaccggaaatcttcgccttcatgcaacatgcattagctgaactgacccgcaatgatataactatggaagaactggttcaacttacactggagacaggtcaacatggggtgtctgccatggcacaactggatactgccaatacaagcagttacggcaatcccgaaattaccgaagtcaatatcggtgtacgcaacaatccgggtatccttatcagcgggcatgacctgaaagacctcgaagaactgctggaacaaacggaaggtacgggaatagacatctatactcacagcgaaatgcttccggcccattactatccccaactaaagaaatacaaacatctggcaggaaactacgggaatgcctggtggaaacaaaaggaggagtttgaaagtttcaacgggccgattctgtttacaagcaactgcattgttcctccacgttccaacgccagctacaaggatcgtatctatgtcaccggcgcttgcggactggaaggagcacattatatcccggaacgtaaggacggaaaaccaaaagatttttcttcactgattgcccacgccaagcaatgccagccaccggtagcaatagaaaacggtactcttatcggcgggtttgcccatgcgcaagtgacggctttggcagacaaagtagtagaagctgtaaagagcggtgcgattcgtaagttctttgtcatggcaggatgcgacggacgtatgaagagtcgtgaatattacacagagtttgcccggaaacttccgaacgatacggttatcctgacagccggatgtgcaaaatacagatacaacaagttgtctttaggtgatatcaacggtattccccgtgtactggatgcaggacagtgtaacgacagttattcactagccgtcattgccctgaaactgaaagaaattttcggtttggatgatgtaaacaagttgcctattgtatataacattgcttggtatgaacagaaagccgttatcgtattgctggccttattagctttgggagtgaaaaacattcatctgggtcctaccctccccgctttcctttctccgaacgtaaagaatgtgttgatagaacaattcggaatcggtggtatcagttcggtagatgaagatattatgaaatttctgtcataactaatagaacctgaatcttacataaaggcgcggacaatgcaatgtttttgtatcgtccgcgcctgaaatttatagtagaatcaacttattctttccggtcagtcatttctcggcaaaatcaaattaaggagtacgcctaccaaagctgccagtccgataccggataaagaaaattccccccaggtaaaaacagctccgccgataccgacagtcaatgttaaagatacgatgataatattccttgtacgactcaagtcaatacaattatttaccagattggctatacccgcacaggctattgtaccgaagagtaaaagcataattccacccaacactgcactcggaattgatttcaacaatgcactgatcttacctataacagaaaataagatagcagaaaacgcggcaatccgaattacctgcggattagtgatcttcgtcagagacatggcacccgttacttcggaataagtagttacaggagggccgcctaccagtccggcaaaaaaacaagccagaccgtctcccaataaagtacgatgtagaccggggtctttcacaaaatcttttccggcaacagtgttgaccacatatacatcaccaatatgctctatcaccggagcaatcgctaccggaatcataaacagcaccggttcccacgaaaacttagggaaaacaaattgaggcaaaccaatccatgccgcatctctgacaccggataaatctaaatcatagaaaagccatgcggccagataacctactataatcccacaaaagataggtatcagttttaaaagtcctttcgctttcatcgaaacaataaccgcagtaaccaacgacaacaaggccagcacccagttttcttttgccatattcacaccggttcccgccagagacagtccaatcagaataatgaccggacctatgacaaccggaggaaacaatttctcaattacccttatcccctgccacttgacaagcgcactcattacaaaataaacaagcgcaacccctaccatgcccgataaagtgccgggtaatccgtaaagttccgtcgcttttatgataggagcaataaaagcaaaactacttcccaagaaaataggaaccttcccacgagtgacagcgtgaaagataagagtaccgatcccggcggtaaataaagcagtggaagggtcgagcccgaccaataacggtacaagaaccgtagctccaaaggctacaaacaggaattgtactcccactatccctttccttaaaggagtaagattatttgaatccataagtatgatgtagattaattgagtgcaaaattaatctttttagacaatttaactaccttttttcacaaaaatacatccaaaaagccctttaatttgttgttaataatgtgtaacttcgcacggtgagaacgaatacgacaattttataacttaataatatattgcctatgatatttacagcagaaaacaccttacttattggttctatcttacttttcgtcagcattgttgttggaaaaaccggataccgcttcggagtgcccactttattactattccttgtagtaggaatgctattcggaagtgacgggctcggactccagttccatgacgccaaagatgcacaattcattggtatggttgcattaagcatcatcttgttttcgggaggtatggatacgaagttcaaagaaatcaaacccattttaggaccaggtatcgtgctttctaccgtcggagttttactcactgcccttttcaccggattgtttatctggtggctatccggcatgagttggacaaatatttatctgcctatcacgacttcattgttattggcagctactatgtcgtctaccgactcggcctccgtattcgctatcctgcgttcgcagaaaatgaatctgaaacataacctccgtcccatgttggaattggaaagtggtagtaatgaccctatggcgtatatgctgaccattgtgctgatacagtttatccaatcggcaggtatgggagtcggtgctattgtcggttcatttgtcattcagtttatggtaggtgcaggtgccggatatgtactcggaaagctggctatccgtatgctgaacaaactcaatattgacaaccaagcattgtatccgatattattgctggcttttgtattcttcaccttttctatcaccgacttgctgaaaggtaacggttaccttgccgtatacatcgcaggtatcatggtaggaaacaataaaatcatgcaccgcaaggacatctacacatttatggacggattgacctggctgttccaaatcatcatgttcctttgcctcggacttctcgtcaatccgcacgaaatgctggaagtagcagtagtagccttgttgatcggtgtctttatgattctcatcgggcgtccgttaagcgtgttcctctgcctgctccctttccggaagattaccatgaaatcacggttgttcgtatcatgggtaggactacgcggtgccgtacctatcatctttgccacctatccggtagttgcaggcgtggaaggttcgaatatcatctttaatatcgtattcttcattaccattgtctcgttggttgtgcagggaacaacgatttctttcgttgcccgcatgctgaacctctccaaaccactggagaaaacagggaatgactttggagtggagctgccggaagaaatagactccgaccttagcgacatgaccattaccacggaaatgctggaagaagcagataccttgaaggatatgaatcttcccaaaggaacattggttatgatagtgaaacgcggagatgagtttttaattcctaacggaacactgaaacttcatgtaggagacaagttgctccttatctccgaaaaatcaaaagaggaagtgaacgaatccgaataaggcgggggacgaaatatgttcaaacatcccccgttaattaaccgtaaaacttaattgtaaaattcggtttacattaatgaagtattaattttgcgcagttttaaactaaatgtgcaaaaacgaatggaacaagaacatcagttcatcgactatattgaacaaagcattatcaagaactgggataaagactctttgactgactacaaaggaattaccctccaatataaagatgtggctcgtaaaatagctaaattccacattgttttagaaagtgccggtattcagccgggagacaagatagcagtctgcggacgtaacagtgcccattgggctgtcacttttctggctactatcacttacggagccgtaattgttcctattctccatgaatttaaagcggataatatccataatattgtcaaccactccgaagccaaactgctttttgtcggcgaccaggcatgggaaaacctgaatgaagacgccatgcccctgttggaaggaatcgcgtcactcaccgatttctcatcattggtatcacgcaatgaaaaactgacatatgctttcgaacaccggaatgcgatatacggtcaacgttacccgaagaatttccgcccggagcatatctgttaccggaaagacaggcccgaggaactggctattatcaactatacttcaggaaccacaggctattcaaaaggtgtcatgctcccctatcgcagtatctggtcgaatgtggcctattgttttgaaatgcttcccgtcaaaccgggcgaccatatcgtttccatgcttcctatgggacacgttttcggtatggtatacgatttcttatatggcttctccgcaggtgcgcatatctatttcctgacacgtatgccgtctccgaaaatcatctcacaatctttctcggagattaagcccagagttatctcttgcgtacctttgattgtagaaaagattatcaagaaagatatcctccctaaagtggatagcaaaatcggaaagttattgctcaaagtacctatcgtcaatgacaaaatcaaatcgttggcccgccaggcagctatggaaatctttggaggtaatttcgacgaaatcattatcggcggcgctcctttcaatgccgaagtagaagcttttctcaaaaagataggtttcccctacaccattgcttacggcatgacagaatgtggtccgattatctgctccagccgttgggatacattgaaacttgcttcctgcggaaaggccaccacccgaatggaagtccgcattgattccccggatcctaaaactcatgccggagagattgtttgcaggggagcgaatatgatgctcggatattataagaatccggaagctaccgcacaaatcattgatgtaaacgggtggttgcatacaggagatctgggtgttatggatgaagaaggttatgtaactgttcgcggacgtagcaagaatatgcttctcacttccagcggacagaatatctatccggaagagatagaaagcaaactgaataatatgccgtatgtggcggaatcattaatcgtattgcaacacgacaaactggtggcgcttatctatccggattttgacgatgcatttgctcacggattgcagcaaaacgatatccagaaagctatggaagtcaatcgtgtcgaactgaatcaacaattgcctaactactgccagatcagcaagattaaaatccatttcgaggaatttgaaaagacagcgaagaaatcaatcaaacgtttcatgtatcaggaagcaaaaggataagatttttttcgtatacaaaagacaagataaataaaaacggtgaacaaacccctgtgcttgttcaccgttttttctaacctaaccaactttatttccttaatctatcatcattcaacaatcttttaccttaaaaccaaacctatccctaacacaataaacctctattaaatcttaacctattttttcttaaagttgtatgaacgaaatagcctgtcctcctccggcagccatacgtacagtcagcgtattttcagctgtgacagtttgttccgtaatctgataatctgccggattcgttttccagtccgccttctcaccgtcggcatagataacagctttatattgtttccccggtttcaggaagtctagttttatttccagtgtacggggagcctcattggtagctgctccgaagaaataattatttttcgctttacgtacaacagctacaaactctcccggttctcctgccaatgccttggattcgtcacaatccgggtcgaaatcgcggaagaaccggaaagcaggatgtccttcataatgctcaatcatatcagaagccatttgcaagggagaatatagaatcacccaattggcaatctgcttcgccaatgttgtgttgacacggctgttccccttatcctggtcattccatttccgacgacggggagagtctttggtttgctggaacaaaatatcaaaagttcccggagtgtagtccattggaccggacagcaagcgggtaaacggcaacattacatgatgagacggcggatttccttcactccatgcattccattccatacctctggctccttcgcgcgtcatcatgttaggccatgtacggcggataccggtatccttaatcggttcgtgtgcatccaatgtcattctatgctccgcagctgtttccactaccttctgataatggttgactccatattgtccatgatgtgaaagcccgttcgggaaagctcctgcataacctgttttcaggatgtggatgctgtggtcggtataccattgcattgcatgatccatttgccgttcatagttcgggatatttcctcctgtttcatggtgtccaatgatttcgattcctttttccttggcataacgtactatttcatctatgtcaaagtcagcgtaaggtttcgtaaaatcaaaattttgcataccgccccaactttcccaaccttcattccagccttcaaacaataccgcttctatattattggcagcagcgaagtcgatatattttttggcattgacagtggtagcaccgtggcgttcatccattttccaagtctctacacccagatgcatcccccaccatacaccgatatatttcaaaggacgaatccaatcagtagtttctaacacacaagggtcattcaggttcaggatcagggaagaattgattaatccgacagcttccggagcaatctggatagtacgccaggaagttgtaaaatggttgcttttgcgtaccttgataccgtccggccaaggagtaagttccgccttcaaagtgtaatctccgatttgtttcagcgtcatttcggagaaatcatacaatgccgcttcatggatacttccgtaaacaccatccgccgtcttaaaggtaaaaggagtattggctgtctccacttcggaaataggctgctgcttataaagcaattcataagtctcggcactcgcaggaatcgaccatgaggtaccgtcctgacggaagtggaaagtagtcagttcatcagttatcatcagagaatccacattgggaacattatattcataacggaaccctactccgtcattgaaaacccggaaacgaagggtcaactgcacctgatcctcattaatcagattgacagccatttcattataatggttccggttggttttattttctccccacggctgcgtccatgtttcatctttgctgtcgaatgtggttttctctatccggaagcctcctcccagaataacaccgtttccctccacaaaacccatttttgaattttctatcagcaatgaatcatttaccgacacattataaaacggagtaccattctcatctaccgtcaacgtcatcttgatgtgaccgtccggtgattttacttctgttttcggactgctacacgcacaacatcccagcatacacagaaaagctacaactaaatgctttactttcatagtacaattatctgtttatatataatacaatccataaagaagaaacacttaattgtatgcgacttttctttataaagaaagtccgaatctgatttgctttgcaggcaaacctcagattcggacttttattttcattaaaacaccggatgttatctatcaaacatcgctcatccggcaattattatttatgcagaagaacatcagtacccggaacaatctttcccattgaccacacacaacgtacattcaactccttatcgagaatcacaatatctgcatccaaccctttagccaatgcaccttttcggtcactgactccaatcaaacgggcgggagtctcggaagccatgcgcactgcatcctccaaaggaatatttgctttctttaccattgtacgcaccaacacatccattgtagccaaactaccggccagcgcggaatggtctgccattttacacactccatcttcaataatataacgcgggtcaatcggttcatgtccttcgtaagcagcgtaagccagcgcatcagtcaccagacacgtattctccactcctttcagtttataaaccagtttcagaatagtggcaggcaaatgaatgccgtccgcaataacttccaccgtcattccgtctgtcagatatacactctccaccgtcccttcatatttatattcacggcgtttgtggaaacccggcattgcattgtaaaaatgagcagcatgtgagaatcccaccgcatacgccgctttaatctcatcatattcggcttctgtatgtgtaactgccgtcattattccctttgaacgggtatatttggcgaaatcatgcgctccacgtaattccgggctgatatcccaacgcttgatacaagtagtatgctccaataacggaatatattcattctcatcaggagttttcagaaaaccttcatactggcttcctgccattttcggattcaaataaggtccctcaatatgcagaccgagaattggagaatccggttcctgcatcaatccctcacacacatcgacagcctgataaagtttttcaaacgatgtggatgacaaagtaggaaacatactggtggcgccatgcttcaaatgcgcggtagttgccatgcggaatgcttcttctgtagcttcggtaaaatcatgtccgccgcctccgtgcgcgtgcatactgacaaatcccggtacgattgtcattccccgggcgtcaataaccgttgcaccgataactgccaggtcactgttggtcacctctaatatttttccgtcacaaatcaataccgaaccgtctttcagccagccttgcggggtaagtattctaccgttaattatctgagttaacatagtcttctttatttattagatttaaaacagtttattggtaccttccactaattgccccattgcccatacggctctcacattcaagtctctgtcgagggcaataatatcggcatccttaccacgttcaagcgttcctttgcggtcaagtactcccattatgcgggcaggcgtttcggataccatgcgtatcacatccgccaaaggtatttccgctttctgcaccatggtacgaatcaagcggtccatagtagccacacttcctgccaaagcagaacggtcggccagcttgcatactccgtcttcaataatcacgcgcgggtcaaaagcagtctggctgtcactggccgcacaagccagtgcatccgttatcagacaggtacgctccactccttttatcttataaacaagacgcagaatagtaggtggtacatgaataccgtcagccaccacttcaaccgtcatgtcgtcaatcaggtaaatactttctaccgtaccttcgtatttatattctttccgtttatggaatcccggcattgcattatagaaatgagtagcatgggtatatccggcttcataggcagtctgtatgtcctcaaactccgcctgcgtatgtcctacggaagccaacactcctttcgccgtgatgtatttaccgaattgcatggctcccggaagctccggcgcagcatcccaacgcttgatacaacgagtttcctccagtagcgggatatattcttccggatcggggtttttgatattttcgggaatctgtccgcctgccatagccatattgaaataatgtccttccagatgaagtcctaatacagggctgtccggttccgccatcatcttctcggtagtctctgcggctgcacgaatcataggaatggtagaagaagaaagagtggggaaaatactggtcgtaccatgctgcatgtgagctttgacagctacccggaaagcttcctccgtgccttccatgaagtctcttccaccgccgccatgaacgtggatttccactcctcccggaacgatatacattcctttggcgtcgataagtttagctccaataattgcaaggtcacaattggttacttccagaattttgttgtcgcgaataagcactgatccatctttcagccaaccttgaggcgtcaggatacgtgcattaatgatttgtgttaacatatcgctattattaaattaattataggcctgtgtgaatcaatgacactctttttgggggaagtacactgattttttcaattgcaaaattacgcttttctattcaatctatcgataaaatagtccggtaaacttccaatataatacaaaaaaaggttgtcaatcttatcgactgacaaccttgttctatttggagcggaaaacgagactcgaactcgcgaccctaaccttggcaaggttatgctctaccaactgagctatttccgcaaactaaatttcttcatccagtagtaatctgaaagattggtgcccagaacaggactcgaacctgcatgcctctcgacacacgcacctgaaacgtgcgcgtctaccaattccgccacctgggcaaaacttagttccatcatttcaaagaaacaagagcggaaaacgagactcgaactcgcgaccctaaccttggcaaggttatgctctaccaactgagctatttccgcaaataacctttcatgaactgtgaagagaaggagactcgaactcccacgacataactgtcactaccccctcaaagtagcgcgtctaccaattccgccacctctccagaattctaaaagtataatctctgtgcccagaacaggactcgaacctgcatgcctctcgacacacgcacctgaaacgtgcgcgtctaccaattccgccacctgggcaaagattattgttccaacatttcaaagaaacatgagcggaaaacgagactcgaactcgcgaccctaaccttggcaaggttatgctctaccaactgagctatttccgcattttttcgtttgcggttgcaaaggtagggattttccgtaaacctgcaaacattctgcacactttttttcacagaaatctctgcactttgcctccaccgccaaacaatctttttgattatcaactcattcggtcacgataatcttcataagaaaattgcttgtatatttcagccttcccttctttcgtccacaaagcaatggcaggatgatgaattccgttaaacatattcgtctttaccatggtgtaatgaatcatatcttcaaacacgatccgttctccgatttgcagttcatgatcgaaactccacagccccatatagtcaccgctcaaacaggagtttcctcctaaacgataaatatattttccttcatttcccatttccgcaccgcgaacggcaggctgataaggcatttccagacagtcgggcatgtggcaggtgaagctgacattcaatatggcagttttaataccacggctttctacaatatccacgacttcagaagtcagcacacccgtctgccaggtaaaggccgaaccgggttcaagaataatacgtaaatgaggataacgggctttcagtccctgcaataattttatcagatgttccgtatcataatctttacgtgtcatcagatgtccgccgcccagattcaaccatttcagttgcggaaaccaacgggaaaacttttcttcgagatgttccaacgttcgttccaactcaaaagaagaagactcgcaatggcaatggcaatgaaagccttcgataccttgtggcaacgtatccggcaataaatcggcagtaattccgaaacgcgtaccgggagcgcaaggattgtaaagttccgtttctacctccgaatattcagggttcacacggataccacaagagataccacctccttttgctacggtcatcggatagaaacgttcgaactgtgccatagaattaaaagtaatatggctactgcaacgcatgatttccgggaaatcctgttctgtatatgcaggtgaataagtatgtgccttacttccgaactcttccagcgccaaacgtgcctcatagaccgagcttgctgtagaatggtctatgtattcacggaatatagggaaagagcgccacatagcaaacgacttgaaagcaagaataatctccactcccgccctgtcggctacgctttttatcaaactcaagttctttcttaaaagttcttcttccatgatgtagcagggagaaggaaactgggtaaaatctatcatatacaatattgttatctaaagtaacgtcttacaaatacggatgcaaaaatacaaattcaaaagcaaagagggattgttttatttttaattaagatattgcttttcgagaactttttcttatttttagaccttattatataagacgtgtaattgtttcatcccaaatacttgactgattatgaataaagacttaagaaaagtagtgattctgctggcacaccccaacatcaaaggatcacaggcaaacaaagcattaatcgatgctgtcagtgacattgaaggagtggcggtgttcaacctttacgaactgtcagaggacattgctttcaatgtggacgaatggagtaaaatcatctccgacgcttcggccgttatctaccagtttcctttctactggatgtctgccccgtcattactaaaaaaatggcaggacgaagtgttcactcacttgtccaagactccggctgtcgcgggcaaaccgttaatgatagtaacgaccaccggctccgaatacgacgcttatcgtagtggcggacgaaaccgattcacaaccgatgaacttctacgtccgtatcaaggcagtgctattcattcgggtatggcgtggcagacacctattgtcgtttacggaatgggaactgcagatgcaggaaaaaatattgccgaaggagcgaattcatataagcaacggatagaaatgcttatcaatagcagtaacgcagggaataattggtaaaacaataaaaagcgtagctttatccgtcctaaagctacgctttagcatccctaaagcactgctttagacctcgtaaaccacttcttcttcagcgtcaataccggcaggaaaataaaaactccaattaccgacataaccaatcccccaatcgtacctgccgccaacggaaaccagaaaccttctttctccgcacctatcatgaaaggaataaatcccagaatagtggaaaccaccgtcaggaaaataggaatcactttcgtgttccaggctttcacgtatgcccggagcggcgagagacacgggtaacgtttacgaatagaattatattcgttcaggatatagatactagcatttactgtgataccgcaaagcagaacaaaagaagcaaaacctccctgatcaaaattcagtttgaaccagtagaatgtaagaaacactccgatataagacaccggaatcacaaaaataatcgctaacggctgtttcaaagaattgaacagaatactcgtaataaagaaaatgatagcaatcacaataagcaacagacgatattgcttattgtcctttcctccccacgaccagttattgtcctccgatttggcagtatatcccattggaagaatctcattaaattcctccagatctttcttcaacagcttatgcccctgttccgaagaaccgatatactcatattgcaggcacagccggtactgctggttttccttggctacttcctgcggcatctgccctttttccactgttgccagttccgacagtttatattcttttccgcctgccggaaaaggataatactgcattgcccacacatccctttcttccgactggcgggaagacaattttattttttccgtaccttcttccgtcgtcaccgaaccaatctccatattccgtccatatatcggtcggatagcggaaaacaatcttccggctccgatattttcctccgccattcggagcttgtccagactgaaataaaattccatataatcatccttccaccacgagaagtcggaaccgatcgttacttccttgatgcgacggtgagacaagaacttctctttcagttgttccgcccggtcatacagttcgtcataattatacccatacattttcacccggaatgaacccgcactctcacgcacattattactgaatccttggtcctgcaatccgtaaatactccaatctcctccacccaattgaagtgccttgtttatcatattagctttcagcgtatacgggaaaccgctcttttggtgctctttcgtgaaataaatatgaatagatgccctgcgtgcactttccacagacgtctggaactgcttgatttctttaaattcgctcaagtaagtttccattcgcttaatcaacgtattcatctgctccagcgtactcccattcggcaaattggcattggcatgaagcaccacttcttcattacgcgtaaaataacttccttcatatactttctgtacaaaaagtcttaaagctcctcccaatgctttatccactaccggttttaccttctctttatacgtagaagtacccagtgtcttattataaaattccgcccatttatcttcccccttcatcttttccggcaacagaaataccggtaatccgaaagccagcaacaataaaatgcagaccgccaccctccaccggcaaagaatccgtatcagccaactgtaaaaacggctgaaatataccggaaaacgatgcattttagaacgtatccacataaagaaacgtatatttcccgacttccacttcgcacctgaaagcgaagattttttcctccgcttcaatccggttttgtcgatcagggaaggaacaaaaaacagggcaaccagcagtgataccccaagattaataatcactaccgcagcaaaatcctgtaagttcaggcgtatcttctcatcgaggaaaaagataatgaccaaagcccccattgtagtcaacgtagccgccagtacggacataaaagccttccggtttccacgccgcagataatggtcgctcatcacaatcgtattgtcaatcaccagatttagagaaaccgtgatacctgccagagaatacaactgcatttcaagtccgaatgcataatagaagataacggctatcgctacattaactgccagactggttacaatcagaaacaaatacttcggactaaaagtaatcaatagcacaaacagaagcagaatcgctaccgtcacccccgttcgcagataaatcttccccagttcttcctgaataaactccgttgcatcatagctggtatgaatctcgtatcccgccggaagaagtaaccggatatcatccatatatgctttcacttccttgctcaatgccaactgattggccgtttcctccgccacgacagacagatagatagagttcagaccgttaattcggtagtaactttgcggctgttcctccacacgggaaacttttaccaattcattcagaccaatgattttgccatctttcatcttcacctgtatccgttccgcatcaaagtcccggttattatattcgggaaccagcgccagacggatccattgcctgcccgaactcccctgttccatatcgtatgtacccagaaactctttctggtaatgcaaccggacagcctgacggatatcatccgtacttatcccaagcgtatgtaactgttcggagtcatattccaaccgccattccattggagtagccccgccaagattaatcttataaattcccggaagttgtgccaaacgtgtcttaatatgttcttccgcatactgttgtatcagaatgggaatagcaggcgcattaatcgtaaatgccataaaagggccctggttgttctgccccggactctgcatctgaatatacggatagctcaccccgtccggcagttccggccatgtctgacgaatgatggtggacgcttcaaaacgtgcaactgcaacatccacatgtttatccagattcacgctgatactgccccacccgtttcctgaagtagaatagataccccgaatccctttcacgcgggcaagcatcgcctccagtttgctggtagctgtcatttccaccacgcgtgccgaagtgccgggcatactgaaacgcaccgtgaagccgggtaatgtccgtgaggggttcagtttgaccggaagcaacggcacaagcgccagcccgaccaatgccacgcagacaaaagccacaatcagggtgaaagcggaagccttcgaggacttttttatttcaagatttatattttgcattaccattatttatgtaaatagaaatctctgtcatataaacgacagcatctctgtttatgatagacttaatggagatactaccgagaataaacgccgcaattatcatttgatcagcttgcctccgttaaaatcgaacctgtccgaaagtgaaagttttgtagcaaaatcaaacaacgtaagccgtcgtatcttgtaataattcaaccagtaattctgcaaagcagagataaagttacgctgtgcctgctgctgcctgttcagagaaagagtcaggctgtttatatccgctttgccgatgataaaacgctgctttgtctcattataagcgagtatggacaaatccaaagcttcttccgcactggcaatcaattgttgctggatattaaaatcactcactgtcattatcacttcctcctcaatacttatctcgtcctggcgtgccgaaatcttcaccacattcaggttattccgtgccatattatactttcctttgcggacgccccagtccagcaacggaatagagacactgaccgccaccaaatcctgctgcatgggcttatgatagacatccccgaaattgtccgccacctgattaaaaccgatactggcattcacacttgcattaaagcgcgactcctttttagtcttatccacattacgctccgcttccagcacattctgtttcaattccaacaattgcgggttgttgctccttccccacctcaaagcctcatctatcggaatctccagcattcccggacgggaaggaagttccagctcgatctgcgtattcttatccagattgagaaaagaagccaatgagaacatagcccgcttcaaatcgcttgctttattctgcaatgtgttctgcgcattcacccgatccagcttcagagtcaacaggtcggcttgcgagatagctgcgatccggtgccgttgttgcccgatgcggtacaacgtatccgtagaagccagattttcttttgccaggttatattccgcttgtgccatagccagagagaagaaataactcgttgccgtttccgaaactttctccacattataaagaaattcctttttcacacgttcatattttaaaggctctatcttccgttcccatttgaatggattataccccaccaaactttgcgaatacccaatccttatcgggacactggtcagctgtgtcgtactattatctccgaaattacgcatataggcaagattcgattccagataaaatgtacctccggtcaggtcaagattctgccggacacttaaacctccataagcataataagactgttgcgtacggtacacatccaaatcctgtcccgaatcgtaacgtttcgtaatatcccggttatattgcgccggagtaagatccagcgtcaggctgggcaggcggtttgccttatatgtcctgtactcccaataaccggacaagtacatattctgtgtacggaatgactccaatgaactgtcattggcaagagcgattgtccggttcaaatccagtaccagacgtttctgtgcatgaagcagggattcaccacagaggacaccaagaatacagagaaatgcccatatccttttctttgctgaaaagaataactttgtctcctccgtggtaaaatttaataatccattcataactctcatatttgaactattcgttattacttgctacttatttcttctttctttctgtaaataaaccagtaaagcaatggtatgatgaacagactcactgccgtaccgaccgacattgtccctatcatggcgatagacaatggtttctgtaattccgaacccatatccgatgaaaacagtaacggcaccattgcaaagatagtagtcagcgaagtcatgataatcgggcgcaaacgcctgcgtcctgcttcatggatagcctccaacaacggaacacccgctttgcgcagttcattgatagcgtccagtttcaggatagagtcattgattacaataccacaggtgacaataagtccgatagcagacatcagattcagtgtatgcccgcaaagccaaagcagtaataacgcaaaggccacatctatcggtatctccgccagaacaagcaaaggttgcaggaaactttcaaactgcgaggcaagaataaaatacatcagcaacaacgaaataaacaggattaccaccagctcgtccaacatctccctgttggaaaagaaacttccggagaagcctgtatcccattctttcgtttcctccgctacctgcttcacttcccgcatcaacttgtccccgttctgcacgtcataaaaattaaaggggacatattcaccattacgccccgaagtaatacttttcagatcctcagcaggagctatcgtaaccagctcccgaagagggatatattctatgtttcctttattatccggttcagtctgtatcaacgtctcctgcaatatttcattcacagtcttttcgctgccggcaacgctgatcggaagatattgttggtaagaatgcaacattgtcacactattctcacgaaaagcagttttcaagatacggtagagctcattataggaaacacggtaaagcaacagtttctctttgctaatacttagattcagttgattctcgaaagcgatacccgtaggggcgattcccgtcttccgtgccaagtccttctccacgcgccggatggtttccgcttccggtgcctttgccttattacgggtataaaactcggctatgatatccggttcgcctgtgacaaagagtttctcaaacacagtctccggcggagagaaagaaatgacggaaagcggataacgctctttcagtctgcgataaatttcttgctgtaaaggagaaatagtttcgggcgtctccgtacggaagtaaagttcagcctcggaagaagaaagctccctttcacggttcagaaggaaatcctgcctgccaatggacgccgtgtgctcggctaccggttcttccagttctttaaaaagttcgtccacacgcctcctgttttcatccacatgaatattctcattccactcaatcctggcaatcaattcattctcctcaatatcgggcatgcgctgcttgtcgataaagaaaaagaaaaatacacaaagcggaatggaaatagcacagaacaaaacactgaacgttttatgactgaatacccagtccacccccgcatcataaaaacgatctaatgtatgatcttttatcgggttattgaatttaaaggaaagccacttccatttccgggtatggataccggtccggtagaccagcagataaagtacgggaagcaacatgatacccgtaaaataagaaaccataagtcccactgtaactgaaaaagcctgatcgtaaaagatagctccggcaataccactcataaaaatcaacggtgcaaacacggcaatggtcgttaaggaggaactcaacatgggagtcaccacttcgcttgttcccgtgatacaggcacggcgcaacgaatatccccgttcccggtattgcgatatattctcagttacaataatcgaactgtcaatcatcatacccaatgccagaatcaatccggcgagtgaaatgatattcagggacatattgcacagatagaagaaaacgaaactgattacgatagaaaccaccatgctaagtccgataaccaacggagattttacatcccccagaaacaagaccgctaccaggcagataaagagaaaacctaaagacagattctgttgcagattcgaaattgtgtagtccagcaattccgtctgattacggctgatactgaaatcaatatccggatatacccgttggaagtactccatcgtctctaccagagatttcttcatcttatccatattctcatccgcctgcttgataacagccagcgtcactgcccttttcccgttagatacagatacccctttttcttttacgggcacaatattcacccggcagaaatcctttaactgcacaatccggtctcctttacgcagataaatattttctacatcttctgcagtacgcaggagggtggaaaactttatgttatattcataatatccgtcacgtaccgtcatactacccggttccacattattggcagccagagtcgattctatatcctcaatagaaattcccaacatggagagcatatcctcatcgggcacaatctgcacctgacgttccaccaatccggtcacatctaccatagccacttcttcaagctgctctatcctacgtttaatgaccgattccgcaaattcacacagatccagaaaggactgttgtcccgtaatgctataagcactgtcattcttcaaagtcagattcaggtaaaaaacaggtatatccgttgcgctcgccttaatgactttcggacgttccgtttccttcgggagatagttcattgcagcgtctatcttttcattgacctcgataaaggccaggtccgtattagtaccgaaatcaaaagacaagcggataataccggcgccgtctctagactcactgtgaatatctttcaatgtagaaacctgtatcaactggctgcgcaaaggtttcacaatcgtattttccagttcgcgggcagatgtattggcagcagacacctgtatagtgatctccggaatagcgatattcggaagcagagatatcggaagtgtagaataagtcaccagcccgattataaaacaggcggtgaaagccatcagcacggcaataggacgctggattaaaaattttatcatgcttttctctgtatttatcgtttgcagtcaatcattcaccgcttatagtcacctccgtttcatgcgctagattcaagttcccggtgacaataaccgtatctccttccaagaggccatcttcaacacctccctgagatttatccgagacaacatattccgtagcattctccaatcccgtatgtacataattccacattgccttgccttcttttaaggtaaacacaacctgtttgccggaacgcagcaccacagccgttttaggaatgaccaactgctcccctaaactccgcttgacgcttacccttacgttcatgccgctaaacaacttcccctgtccgtttaccgcagcttttacttttaccattccgttcgcatccaccagcggattgatttcagatacactaccttcataagaacctccgccggcataaggagtaatcattactttgtcaccggttttaataaaagccagttcgttctccaacacggtgaaatcagtttccatcccacgagtgtcaatgacagtacaaaatgcctcggacgtattagcgagattataaggttttgaaaacagattagctactatcccgtcaaagggggcaacaagtgtagcatgctccgtttctctttttgtaagttcatactgggacttcgactgttcatagccgctctttactttcgcaagtttcatggtttcttcaggtaccttgctaaaatcatccggcgtatatccctgcccaataagtacatctttcagttcaagctccgctttcaacaaagcatcttccgcctgtgataatttctgttccagacggaatttatccagctcggccaacttctgccccttacgaacacgatcaccgtttttcacatagacatgagcaataacctcattcgtttcaaaacgaagatcagcctgcccgcgggcacttaccttgccgttactgactagttcgtgatgaaaatcacacctctttagaatttgaacggtgacttcattctttgaatccggaagaacggtagaaacacctttatcctgctcgtctgcatcacttttcttgccagagcaagatgtcattccaccataagctaaacaacatagcagcatccatatataactgtattttctcataaggatatttgttttcatagcattttattttatgttctacttagctacaaaagtaacataattggaatatctatattttttttatcagtaataattttctcagatacataatatcataactattcttaacagtatacatttacatttcgccctaacctatgcgttcatttcaaatatttctgtacttccgcccgcatctcttttactgccgtcgattgcactttcggttctttcgttaatacaacctccgccgcatatttcaacttctcaggctgccgatattccgattccgcataaagtttcaccaaaagataataaggataaatccgtcccggaagtcgatgagtagaccgtatcaaactctcttccgcctcttcgtattctcctgttgcctgatagttttttccgataatattaagaaccatcggatcacaagtatatttcattgcttcttgcatcaatcttgtagaattatcatattctttcaatttatgcaaacagtgtccatattcaaaaaggaaagttccccgagtcttcaaatccggatacagcttttcatacccttctttagctgcctgataagcgccaatattataaagcattttacttcgataccactctttacaagccttatattgattattcttccagtaatatgctcctaacaaagctatcatcaaaataaagaatagcaacgccacctttgaacgccctatgacacaagcggctaacaagaaatagaatgtcattgcaaatcccggaatctgcatcggataggaagataaggcaaacactaaaaccgaaatcaccccaccacaaatacctatttgtttttcggtaattcctctccaaaaacaaaaagcaataactagtaaaacaacaaataagaaagggattccatattccaccgccacctgcagatattcattaaaagcatattccggactacctgctaccaattcctccgtctccgaatattctccatttgcaaaatattcttcctgagccctcccataagcagaaacaaatccatctgcaccatgtccaacaaccggactttcagcaatagccagacaactgattttccacattaacaaacgtccgttggcagaagctgctttcagctgaaaaaggacataacctatcattatcaacactaatcccccaatcaccaaacctgttatcattgtcttcttgtatttctgccccgcctctttcaaccatgttgcccaagaagcatgtattccgtatacccatatacccgaaactgcggcagccatccatgccgaacggctcattccggcaggtagtacacacaaaatcaacagcataactcctaatgccatataatactttccctgttctacccatgtgcgttccgttctttctttcaagtttaaccactcatgcagacaaagcggaaatatcatcgccaaatatccggaataaggtcccggattatagaaagatcccgtaagcgcatacagggaatgattggaaacagccagaccgtatatctgtctcatcccccaggcagcttcaattcctcccaatgcaatcaatacccatgttactatcgccggaaaagacagatattgtttcctgttcaggcaaagagacaacagactgcaaacgacaaaaacaacagccatacgtcccaaccatagtttctgatatgccatttcgccgataggaatctcattcggaatagtaaaaactattacgctcagaattgccgcaactcctatacaagttaccacatccgccatattcttttttgtcatttgcatcaattccaactttagcttcattctttatttgattttcttcatcatcctattccaacgggatttccccgtaaacttatcttccgaataccatatacgggtagccttacctacaatgtattcttccggcagcatcccccaatatctcgaatcctgcgagttagccatattatcaccggaaacaaaataatagttctttttaaagcgatactgtgcaatcacgctgtcacccaatactatctgtccatcctttatacgtaatttcttcttctgttcccaccctatcaattgcctgtataaaagacaattcgtacggttcatctttactgtctgacctttttgaggaatcggcaaaggtccgaactcacggatagtccaatccatttgcttatcataaggaaatgtacctaccacaataccatattgttccggatacttcagattcgcaagagattgttgagcattataatttcccaaccgttcgtcacacccccgtattttataaaatccttcccgaatctctaaagtatctcccggaagcgcaatacaccgctttacataatattgcatcacatcaagccggatactatcccaacgattcattcgataagggaaattaaaaaccaatatatcattcctcttgaaatttccccatccgggcattcgatgaatagtaatatcttcattattcaacgcagcaaacacatcgaacaaccgcgcaccctttatcatcttattaaccaagatccggtcgccatccttcaatgcaggttccattgagtccgaaggtatcctgaatgaagtaaaacagaataactgcatcaaaaacaaaattaccactgtgcagaataggaagactgccagattctcgaatattgctacaactttctttactctattcatatacttcctttagttgaatcagcctacgataagcctccagtcccaacgtacatttcacacattcatcattttcacccaataatccctccaaagggaaagtctctttctttatcctcttttgcaaataatctgcccacaaaatcaactggctccaatgcatatcagcataaccgaagtcttgttccgcttccacaatagcagttgtcattatcaacatattggcagcggcttccacagcacaactttccaattttacctgcttaccggataccggatacaaaccaatatcataaggcggatgtttcttgttccaatatatcccctcacaatatataaatacagggtccaacaaactcttcatccagtcgacacgattgaaaaacaacaatgccggaaagcttttataagcttctcttacattacctaaagtatcaccgaaacaaaacaatttatcatccggagacaatacaaatctatgggaagataaaaaattacggtaagcaggaagtatatactcggcaagcgtttcacctcctacttgtaaagccttgtcattccacttataatccagtttttcactttcctgcctaagctcctgacacctgtttcctacagatttcattagttcttttacctcttttgctccatcattattccaaagagggcgtaagttctccccaccatattgtaaagtctgcccttctttatatccaataagcaacacacctctatcttccttccccgaacacaacttttgtgacaaaatgatatgattgtcttcatatgaaaaccttgtctcatccgtcctcatagccaaatacaaactatcggacttcgtaaaacgccacccctgctccacccaactattgacttctctcttaccgaacatccactccgtatccacatcaaacagtattttcaccgtatgctctttttctctttccgtacgaatctgataagaaaggaaaccgacaggccagcctgtcatatcccacttttctgataaagaagacgagataaaatcaatctgaagttctacatctccacattgaaaaacaaattgagtccgagtggcttgcacatccttctgcttcaatattgccggttccgcatcagtatatgttttattttctatgtacaaaccaaaatccaataaggcaggacctcccgtattccgacagtatgcggccagaacattatctccattaactatttgattaatagcttcatctgtcaaacgttgacatttcgtttgatttgtaaatccactttttaacagatatcttccattacaaaaaagctttatttgatcgtcgcatatataacggacatagactttatgttccttcaacaggtctttatcatcaactctgatatgtctgcgaacatatatattctctgctccccataatgtatgagccggataattaccttttacaggtccaaaagcccctttaccttcatcccataaagaatcatcatattccttttgctcccaaccttttcccggaaacaaaaaagaatactttccctcccagccgatactgtcattagaaagaggagctaaggaaaatatgcgtaaagagtcactccccatgaaacgataagccttaccatctacacacaaaacacctgttatcggaaatacctttccagttctcaacttcggataacttttatttaatgtatctcccaacaccttgagactaaagtcgggagtaatcgccaatagcgtatgttcagaaggagtaatgtcggaaagagacaaaatcttcctatccggacaggaacaagcatatatcagagagacaataaccgaaataataattaccctccatactccaacaagcctgacattagttttcatttccatagctgagttttgttttcataaataaaaattctttcatccagcccacgtgtatgatttctcaaaagtaacaatgcgtttgcaggaatatcccgaaaaaccaatgaatcggcagtcgccttaatttttccggcagacttccagtcgttgtcacaataaaataattcataaacatcaccgggacgaacatagttatccctattgcgcggagtataaacaatacgctctacccgtacttttctacccaaatcaagtcctgcccatccgccggtaggtttaaaataatcgaaagaggtccatgttttcccgtcaaagacatttgtatattcatgcgtcccgtcatgttgataacagccgggagttcctatgattttcccagataaggctactgtgtcattcttctcataaaaagcgacttccgaaacattacaagaccctttagccggaccaaaatatctaagataacggtactccttatcagaccaactttttacagtagtactcagacgttcaggtttactttgtataataaacaaggtatctttctccaaaaaatcaggatgattacttccctcaaaaactcctcctaacattcgatttctatatatatcttctctcccaatatcacacttggcatataatactacatcctgcttctctatagtgacaggataatagcagatttcattgctttgcttatcaatataaaagggatctgtcaaaaagcataatacgccattttcataagtagctgctctcataaatgtacctttccgcacataccggaatgccaaatgaccagcatcatattcagtccaatcaacaggagtccaacggtctctatcgctaacgcataaataagctatttttccgctccgtttcactttatactgtttttctaaaggaataaccaactcttctttgagataataaccatattcgtgagttacgtcaataaatttaggtaaacgccaaaaagggtatagttcttcgccgtactttgccatctgttcatacatttccctattcgcactaaaagtatatctatacactttagaactgtcatcccaccgataccaccaattcttacgcactggcactaatttttgtggaaagtcagtcatatattcctctccgtctttattccatgttgtcagccaaaaatgcccggcatttatataacttcgcacaggtacaaagtcaatagcacaaggaatacccaaagctcgaaataggtatacggcaaaatctgtaacttctctacacgtcccggataaatactgtacatattccggtcctatatgtccaaatggatatggcgttacagaagtataataatagttcttatcaggcaatttacttattagaaaattagcggcaaccaccggatcttctatatccaatgaatcagacatacgcaatgaatccagtaacgaattatatttttcataatatgtttcacgccagtatgctaatggctcatcagctattcgataaggcaacaaatactcacaaaatgtttcaaatgaaatattctttccccacggttgctcctgccagactttaaatgcccaatcaatattatggcatagataagcagaatctatctctattatatctcgtttatttttagggacctgcattagtccaaagacttttttcaccgagtctgcaacttgttctgaaacttttcctttgcttgtttttagccaagcataataagatttatagttttctaattgctctccttcagaatagaaatagaaaggtatattctctatcaaaaagcaggctgctttatactttaggctatcagcagggtacttttgatagtgacgaatcactttgtgtagttctccctcattatcttcagcagattgtaaagcaacttcaagtgaagatattagtttttcttctaaaaaacattttcctatataccaccatcccaataagaaaaatgccaaaacaagaataaatcggatatatattctatgtttcttcatcataacttaatctcacttagcatttcctgaaatattcagcaaaataggtgaatctttttcattacaatatacagttatagtcttattgaaatattcaggtcggtccgctgtatacttcactttcagagttaaattcttctctggttgcactggtgtttttgaatactctacagttgtacaaccacaagaagtaattacattatccaccactagtaattcctgtccgatattagttagaataaattcacaagacttttgtttcttccaatcaaatgttcccaaatccatgtactttttatctattgaaacttctgtttgtttccttttttctacctcggaaatattctgtttatcaaatattatattcatatataactcctttattttagggttatgcatgggattgcctatagccaaaactttattatgctcatccaacaagaatgtttgcaacattgcattggaaggaaagtgattcaacttattaagagaatcattcctatctatacaaactggaatatcaaaactctggctacatagtaacaacaacaaatctctcatatctttaggatgtataaaaaacaaaaaggaaactttgttatcagatatagaatctatttgtatcatccattccaaccactgtgataacctcaaattacaccctacgcatcctattgaatcggtataaaccaagatcttatatttacttgtaggtattgaattataaacagagtccttacctaatcgagtaaaaacatactcattatcaaatttaatctctttattaatccattcttcaaccacattagtaattccaacatttgccttctctcgacgacatgaatggcaactcattaaaatagcaaatatatttatataaaatagaaccttaagcatactttccattaatcataatatcgaatataaaaataacaaaagacaataatatttctattcttttcaaagccaaactacacaaagtaatttcatttcagagatattatatctatagttaaatcgtcagtattattcttttcgtctaaaacattgtcaacaaaaagagctataccaccataagttgcattccaacttgtaaaaggactatatctgcaattagataatttcgtttcaccgattttttccatattttcatcgaacagcattaaatataagtcacgctcattgataagcttctccataccttttttttcatcaaaatcaactttatcagcatgtaaacgagcatatattttatatttaggtaaatacatgatatcataaaaatgagaattttcgagccagtgtttttccaaagtagcataatccccgcttgtcgtacatttctctattatattggaagtatagtgactatctgccaatatgtatttccgttcgtttgttcttatgtctagcatataaatagaagattcaacaggataattgtatacaatattttcacctacaaaattaacattggggaaattgatatatgcatatcccttactcatatcaggaacaaccttagacgatgataactgataagttgccatcttgccaacttcatctataaaagcttcttttactatgaatgtgttagaaggtgtatgttttactaaaaacattaatgaatgacgagaggcattataaaacaagtgagaagtgaacattgcataattagtatttattagtaactgctcctgatcctccaaatatttctttaaatcaatcattctttttatcgttcccacactatcaattaggaaagcgcgttctgactcatcagatatccatacagaatctaacgattgtgcatatattcccgacaagcggacaatagcatcaggaccatcgcctggcaatacaatctgagttaccgacttagatttcagattcatacaatccaacgaatgcaatctataattataaccaatcaaataatctattgaatcaacatgaacagacgaagataaatagtatgattttagttgcagaacatcttgtgggggaaatttaatttcccccacctctattgcaatcttatcattattatcattctctttccccgttttttgtcctgtgcacgacactaaaatcatacacaacataagaaaaaagatttttaaatatgacataataatcaacaataagttaattttgcacatctgttaccttcgtcatatttctttgaactacactctgcgccagcatgagtagggcatggatgtaaataatatgagccactagtttctcctccccatgcaaaagcttctacgttagctaaaaccagatctgacaattttgtttcattttgtgatatataaacattgtatcctgcaactattgcaactactgccacaactaccatacctaataatttctttttcatatttaatactttatattagtgaataaactttcatttcttctgtatctatcatttcaacagaatagcaatagtttgctacattaattttttattcttatgtttgcatcggaatctttttttaaaggttaaggagcagatgatatgtaagcaaatccggcaagatgaacaaactcatcatcctgctcctttttaatcaagttaattatctaatcttagccaaagctaaatttcagtattggctgatcgttatttacatccgtcgccataattgttttagtaacttcatccacccaaataccatatatataatggtctagcacatatttacataatggttctcctttcaaactaaaaacataaatgtacttacctccatcaggaagtcttccgctttgtctagctatatctttaaaagaggttccatgaaacaccgcataaatagcatcatcagtaacttgcacatcactgaatcccataatacctgttggtataccatagccatctgatactttgaattcaggttcatcatattcaccaacacgaatgacatgagtactatcttttaaattatagatttcaaccacttctcctaactgagtaacggtagccaaaacactattatgagaattataatctaaaaagctgcgccatgcctgggctaatgccggacgggcttcttgcagggctttcttatttgtcgttggtatagttcctattttctctattagcttacccttacaatcaacttttaaaaagcgactctcacctgaatagtcaggaatgacaaatgttgtatcgttatatatagcaaaatcaagtggtcgaagtatatcttcatccaatgctaccgtttcctcacgaagcagtgaatcaccggatgaagaaaaatctaacctagttaattcgcttttgttagcatctaaagtccataatgtatggttatgtaaacggaaattttccattgacaacatttctaaaggagaatcaccccgcctaccgaaagaggatagataccggaaacttgggtattgaaataagtgcccataataatcggaaccatgcaaatccaacacaatagctttatctccttctatccgtatccgaaaaggataacgaaacaaggctgtatcaagttctattacttctcctttcaattctttttcttgtggaaattgggaataaggaaatacattgtttgcatattccttatttttcgttccgcaagaaataaagagcaaaaaaagaagaagaacagcactattcttcaagactgtaaccgctaaagacatattttactttaactttagagattggacagtcgacagaaccactcccaagacaagtatgaggcatatcttgctcataagcagctaaagcttccacattatctaataacaatgtatttacccgaggctcttttagtgagtactttacagaaataaccgctactaccaaaataaaaaagaataatagttttttcatatatacataattttatcgattaattaatggaagcgaaagtatgcaattggcttacaacaacaaaggaattcacctaaccatttctatccaaccgattctatccattgtatatactactctacagaaaaggtatttatgcaaaaatctcccttttcatcggagattatagttattcaatcaaattcttctaatatacaactggtagccaaccttttcatatctttgaacctcaatagaaggaatattttcaaagactcctcgtaaacgacttattgcattatgaagtctcgactcattattcgatttgttcgaccaaaaaatttcttgtatttcttcatcttttaatataaattccggagcttccaagaaatgtcttaataaaacagatatttgtggtttcattagaatttcctctttaccaactattagcttttttaagtctgcatcaaatataatattttgatctaattgatagacatgagcagaagtaggaataagaatatttttatgttttttcgaaagaaaaaacaacactataatactagtaattatgagtaaccaatagatgaaagcataaatgattcctcttgtacctacaagatcaaaaaacgaaaagctacaaaagccttttaattcaacttcgcaacgataacctatcgttatatcaaaacaagctatataatcttcaagaagaaggtcgttcggaaatacgcaacttgtagtatttccgtctttatcagacaagaaaaattgtaaagcaaaagcggtaaacattttttgctgttccaagtgttgttgccacttcccatataaagaatccaccactaaagggtgttctaccaaataagcggaatgtaaaatacgcaatcgtggatcatgagctatatttcttctacttttttctctatccaaataatacccatgttccccactttcatctgtcagataaacagtatcaggatattcctccaattgacgtttccgttcactagtggaaagatagccttcaaaagaatcttcttgcaattgtcgcaataaaacctctttgaatgttctttccaacttttcgcaatacgctttttttctaacactataatatagctgtcctaaaatgaaaaaaaaggctatccccaagaaaaaaactattaataaaggatacatcttttgttttccaatatacacaatcatatcgcttagctttctcattaatctcatcacgtgacttatttatctgtttgaatagcgcaaaggtaataatttgcaaaaaccaacggacgatattaaaaactatttttagccattcatacctctttttccatgtacatccaagcaaactacttatcttaatatttcattatccagcaatcggcattattccccagctgattaagttcttattccgtttttactatatataatatagggttatcatcgtcaacaaaattaacgtctttaaaaaccgccttccctttttccgtaagttcacttcctgcattttcaatgtccattggactcaaaattgcaataaattcatcttgccctttcgtgaactcaaaaagaggatattgtagtccggttaaatcatcaacacaattttcaaatgtatatgaccgggttactccctgtcttttatcatatacagcaacacaaggcatttgcttgtcgaagaatattaattgtatgtaatttctattttccgttaaatatttaatttttccacgagaatttgctaatttcttttttacttccctatgaggaatatcttctaaatcctcaaaatcaatactttcttcgccaaaattcacttcataggcaacctttattctatgatcggattgcatctcataaatcttattatccaaatagatccgatatagcaaaatagaatcttgtttagaaaaaggatgtataagcatcaaaagattatctcccattcgtttattcggaaaatcttcatatagtatccttccttttatatcagtcacaataagattgcccctatcaagtctatcacacacaaaatgcaactgatttttctgatattccatagcatcagcaaagaaatcgagagttattgtcccaagagactgtccagacaaagaataagtaaagagttttttcttatcacaaagcacataaattaaattcttttccttgtctatggaaaaatcattaatttgcatatattcattaggcccgctccctctttttccaatagcaaatttatattctccctgggtatcgaatacatacaaacgggcactatgcattttatccaaaacaaatatcttcccatcataaaattccaacttacttatcccgcctatcagacaactatcattggtttcaagtggaataacggaaaaagatgaagctatgcttgacaacttaaatttcccgccattaatctcctgacaatcaatcatcttatattcaccattcggagtgtttatagtagaagaccgcctgcatgaagatactaaaactaaaaggaagaaaaagaatagaaaaacgatactatttttcagaactgtaatacacactgacatattccacctcgatttaccaatagatgtaatcatgctatttcgtcttgccattaatttcatcacgtgatttatttatatgtttgaataacacaaagataatattatttataataaccaacagataatattaaaaactatttagccattcatttctctttttccatgcacatctaagcaaactacttatcttaatatttcattatccagcaatcggcattattccccaactgggaaacttcatcatttcaaataatatttcaatattacaggattatcgtcttctttcagcgtctccattttatgaatttcttgtggtgacatcaaattacgatccatatattgagacaactcatccggttggcaaatagcaagtaatacattatctattataccaaaacaaggatacataaagaagggctttccttctttcaacagaaaaccttcattctttttcctattataaatataatgactgccatatcctctcactgctttagctaaaaagatatatacataatcatcattgaaaaatttaagcaatggcaaagtctttcctgatttcctcagatattgatatctttccgttgcgtcttctgttatttttcttctttcctcatcagagtcagttctctttccgctcgcccttccaggcaagttatcatcttcaacttccgcatccccaaaatcaagatacataataggattaagtttcttttctttcgcatttatttgatagaaataataattaagtccgaaaggaacaaaataaaattgttctcctatatgataaaaacaattatgcgccatagtgttttcggaaatagttccttcataatttgcactaatagcttcttgagttctcaaattaacaaatgaaacttcttgatccgtccacataaaaggattagtaaagatataattatctgtatctaaagccatcaagtaatccacaggaaattccggtttaaactttctctttgccaatagctcaaatgttggactataagtatatattgttccataaggattgagcagatcaataccttttaagtaaggatttagattaatatccaataccatgacgtaatcttccggtccttgccctttcatcttctttgaatttgcaacatattgcccattccccgaaaatgtataaatgatttgatcacttgtataaatcacaaacatatccgtccttttatcataaaggactttattacatctatgaaataaagatgaatcattcgtttccaaaggcacaatctctattttctctaaaaacaatgaaacatcctgcgaaacttcatctacttcgaccggtattatttcaataccacttggcaaactcttattgttcgtggaacacgcacaaataataatcgataatactattaaactagctgttttcatcattagttttctatggaaaatagtacttttagttttcattgtgtgtcacatttttgtatgtcttaactacaaagttaacgtaatctatgacaattatagaatatcactcactattttatcttttctcattagaaaatctgtcctatttttaaaatttccctatcaaatactaagtcaaaaaagaaaattaccactccgaccctgccaatggcatactttatttctgtatcaacagagtgacgctatcgcatacaaatagcaacggtatagagaccggatagctacgctattccgaccctataccgtcgctatataaagcccaatataattgtgttgatttctagtctcagcgctgtgtaggcagggtaaattcctgcgaatcgcaaattattccgttctcgtccgccaccgctacacgaaatgttacctcaccgtctttcagtttctcgcctgcatgaatggaagcggtgtaacgaataccttcccccggaaggatttcctctatcatcacagaaggagaaatgccgagatgcttcaccttgcccactgtttctaccaaggggacaatattatagacagggttccgtccttcattcataatctcaaagatgatcttgctattctctcccgcatcaatcacatgactacggttatcatcaataaaacgaatcctgcgcagtttcagctgggtaagaggtcgctgtacctgtggctgtttcttatatttccggacacgaacttcccgtacttcaggaatataagcatcctcctctatcggttcttgtctcggcgctgtcaatgcattccctatcgctgcaccggcaatggtccctacaatatttccaatagcagaaccgcgataaccgcctctccagccatgattattatctccgataagccctcctatcgagccgcccagacttcctccgatagaagcgcctgccatgatagctcccggatttcccatacgccccgatgcacacccgctcaaaatcaaagcggaaagcaaaattactgttatttgtttcttcatgaccttctctatttagtgtgttactatttattttatcactttaaaacgggcaaaacgcaataatagttgtttgtcacccgcatttttgaaatgaatggttgctttcgcattatctcccgttccttccactttcatcacttcacccagtccgaaacgttcgtgctctatcatctgtccggcacgtactcccgtcaccgacgcagcattcgaagctgccgactgtgcactactgcttccactcaccgcactcacttttttcaggtttctcggcacactgggggctataatctgtgctttcggacgtgcacgctgttcggaagaactactaccgaaagaagcacgcgacggagaagcggaacgggtgaagcctccctcaatctccctgcggaaacgccctgcgccttcatcaaccgaacgactcactcctgcctcatgcggtaattgcaaataatgaacatcaatatcacgcaggaagcggctgggacttccaaattccatttttccgtaacgaaaacgggtctttgcaaacgaaagatagcaatgttcttccgcacgggtgatcgccacatagaacaaacggcgttcttcttccaatgcacgaggagaatctcctgccattccactgggaaagagattttcttccagcccgaccacaaatacgttcttaaattccagtcctttagccgaatgcacggtcatcaaggttatcttttccccgtcatccgctttatcagagtcctgatcggtaagcaaggcaatctccgaaagaaaatcggtcagggaaatgttcgggttaccttcttcctgccgcaaagcacaaaagtcattcatcccgttcaccaactcctcgatattttctttcctgctcaagttttcaggcgacgtatcctgacagacatcattgatgataccggactgacggataatatctgttcctatttcgtatgcattcttatccgcctgaccggtaataaaaccctcaatcagttcacggaaaccttgcaatttcgcatgcgtccctttattgatattgagcccataactcaatggttcacaaagtgccgcccaaaggctgacaccattatcggtagccgccgatataatctttccgacagtagtatccccgataccacgggcaggataattaatgatacgtttgaacgcttcttcatcattcggattcaccaccaaccggaagtaagcaatcacatcctttatctccttacgctggtaaaacgagagtcctccatatatcttatagggcatacttcgtttccgaagtgcttcctcaaaaacacggctctgcgcattcgttcgatataagatagcaaattcggcatatccgtaacgaaactcccggcgcaattctgctattttgttcgccacaatatccccttcttctacatcactgtaagcttgaaataccccaatcggctctcccttttctttctccgagaatacggctttccgtatctgacgttcattcttctcaatcagactgttggcagcacagacgatcgtttgcgtagagcgataattctgttccaacttgaagactttcgtatccggatagatttttgtaaaataaaggatgttgtcaatatccgcaccccggaaggagtagatactctgtgcatcatcccctaccacgcagacacgctggttttccttcgttagttgcaggacaatgctgtgctgcgcatagttcgtatcttgatactcgtccaccaacacataacggaactgatcacgataatgcgccagcacatccgggaaatcacggaacaggatataagtatacaccagcaaatcatcgaagtccattgccccggcctggcggcatctctcccagtaacgggtataaatatcacggatagcaggcattttagcggccatatcgccttcataagcctctttgttagcggcatatcccgtaggagtgaccagatgatttttggcattggaaatacgtgcctgtacgactcccggcttataggtcttttcatccaaccccatttccttaatgattgaacgaagcagacttttgctatctgccgtatcataaatagtaaattgggaagtaaatccgatatatgatgcttcggcacgaaggatacgggagaaaatggaatggaaagtgcccatccacaaataacgtgcccgctccatacctacctgacgggcaatacgctccttcatctcacgcgccgccttattggtaaaagtcagtgcaaggatgttccacgggttgtaaccgttctcaagcaaataggcaattttataagtcaatacgcgcgtctttcccgaaccggcaccggctattaccagcgaaggtccgtcgttataagtcactgcagcacactgactctcattcaactcctctatataattggtattcataacagcattataaaaactatgaggatttttaacaaacccttggcgttcaattttgttctcaatacaaaagtataatattcatttgagaatgaaggtatttttatgatttttcatcactaactattttaacctaacccccaaaagcaatgaaaagaggtatatttttatcaattattttaggtttgtgcctgattacctgcattccgcaggtcatggcgcaaaaacaaagccgcatggaaaagttgctcaggtatctgaacgacaacgacgccgacaaatggcagaagaaccgcgaaaagctggatgatgagacgcaaacttattactctgaagaactggcactgctggatgtgctccaccaactatggaatgaacatagcgaacaggctgtcacaaactatttcggatgttacgggaaagctttccaaggaaatttttccacgatttgtgacgaagaaaaaatacagctttccgatgtacggaacagagctgaacagtcgattatctacatcctggaaggttcgaaggacaagattcctttcagccgggcagtgatagacagcattcgctcaactgattatccggccgactccgtaatgctgcaaaggctacgggatattcgcgaactggcattattggaaggtatgctaaaaacacccacgcccggcacttatcagacgtatctcgcagaatatccaaacggaaagttcatcgcacaagtcaacgctgccgaaaacaaacggctctatcaacttgtggaaaaagatccttcttccggaaatttcaaagcattcttcgacaatgccgatatgcagaaatttttcaaggataaagacagtcgtccttatcttgcggaggtacgttcgctttacgacaatttcctgttccagcacatcgacagtctccaaaaagaagggaatgccactgcgatccgccaaattatcgacgactacaagcatacgccgtacctgactgccgccgcccgtactcatctggatgatttggagtacttgagcgagaaagctgattttgaactgttgaaaccggctattgtcaattctgagtctttgagtttactgaaagattttctctgtacacatcattacaaagaatttcgtgaccaggcaaatgcactacgtaacccattcgtcttgcaagccattctcgccactcctacttctgtaaaatattacaatcagggaaggttgataaagtccgtagaaaatgatagtacgggaaatacctcaaccacttatacatacaatgagaaaggacagctcacctctatgctttcaatcaccgaaaaaaacgggcaaataagtaacgagatacaaacgaacagactgtacgatccgcaagggcactgcatctttgaggtgaagacgaatccgaaaaccaaaacggacatttaccggcaaacacgccgcattggtgccgacggaagcatagaaagcgactcgctgaaatatacggacggaagattcgctgtcagcacctacaacaagcagggacaactgacagaaaccaaggaatacaacaagaacggggaacttcaggcatataaggccaataagtatgacgaaaaaggacggctgacggaatcacaacaccaaaatctgctgttcgccaacgtaccggatcaaattctttctcaaaaagaatcgtatgaatatgacaaatacggttacctgacccggatagtttaccaacgcataacgggcaataaccagaaaacttccggttacctgacttgcctgtacgatgattatggtaaccggattgacggtaactcctattacgaatatgataatacaggacaatggatctatcgcgcagaacgcgacaatccgaaggaaacagagcgtgtacagtacatttacaaataaaatgagatgtagtgaaccttttccgccaacctgctgttattatagtataacaagccaattaaaacttgtaacattatgaatactatattaatgtctttaataattatgaccatgacttacgaaatgccaaaacttccctacgcaaacaatgcgttggaacctgtaatcagtcagcaaacaatagatttccattacggaaagcatctacaaacgtatgtaaataatctgaatagccttgtgcccggaacagaatatgaaggtaaaacggtagaagaaatcgttgcctcagcaccggacggagctatattcaataatgcgggacaagtattgaaccacaatctgtacttcctgcaattcgccccgaaaccttcgaagaaagaacccggaggcaaactgggagaagcaatcaaacgtgacttcggcagcttcgagaacttcaagaaagaattcaatgcagcagcagtcggattgtttggttctggttgggcctggttgtccgtagacaagaacggtaaactgcatatcaccaaagaaagtaacggaagtaacccggtacgcgccgggctgaaacctcttctcggatttgacgtgtgggagcactcttactacctggattaccagaaccgccgcgccgaccacgtgaacgccctgtggaatatcatcgactgggatgtggtagaaaaaagaatgtaaccggacgcatataataaactaaactatactattgaaaaggtcgttgtgaatttcacagcggccttttttctagcataaaaaaaggtaatatatttattggatatcagctacataagttgtatttttgcgatacttgaatcaacataacaaacaattatgacactttataaaagaaataagatattgttcattgtcttcattgctctcctattcttctccccccgtttatgcaatgctgccgacacagaagaatctgcagaagagatacttttcattacctcctataattctgatactaaatatacctacgacaacatatcaacatttatacagacttatacccaactgggcggaaagtactccactatcgtagaaaatatgaatgtaacggatttgtcacaggcccataaatggaaagaaacgctaaccgagattctggataaacatccgggtgcaaaattagttattttcctcggcggtgaggcatggagcagcttccttcatctcgaagatgagaaatacaaaagactccccgtattctttgcaatggcatcccgcaacggcatccgaattccggatgagcctattgatatgcaacaatatgaaccccagagcattgacttgacggaacgaatgaaagaatataatgtaaaatactgttcttcatacgaatacgatattaacaaggatatagaaatgatgaaatatttctatccggaaatggaacatctggcatttgtttcggataatacatacaacggtcttgccgaacaggcctggtttaaaaagaatctgaaaaatcatccggaactgtctatcacttacatcgacggccgaatccatacacttgatatggcggtcaaccaattacgtgttctccccaaaaattcggtaatgctgcttggcatctggcgaattgataacagaggaatcacctatatgaataattccgtttatgctttctccaaagcaaatcctttattgcctgtgttcagtctgacgtccaccgcaataggttattgggctatcggaggatatgtcccccaatatgaagggatagccaaaggaatgggagaatacgcatatcagtttctggataaagggaaaaatgacatccgtagcattaatatattacccaacaaatataaatttgatgccaataaattaaaagaatggggatttgaagacaagaagttacccattaattcaatcgtaatcaaccagccgatccctttctttgtggcttacaaaacggaagtacagtttatcctgctcaccttccttgtattgataggcggactgatgattgcattgtattactattaccggactaaaattctgaagaatcgtctggaaagaacaacgaaacaactacgggaagataaaaagaaactggaagcatcggagatagaattgcgtgacgccaaagagcgtgcggaggaagccaaccagctaaagagtgcttttgtgtcgaatatgagtcacgaaatacgtacgccattaaatgcaatcgtaggtttctccagtttgctaatcaattccgtagaaccttcggaagaattgcaagaatatgccaatatcatccagaccaattctaacctgttgctacagcttatcagcgacgtactggatgtatcgcgtctcgaatcgggaaagctgcaattcaactatgaatggtgcgaactggtgactcattgccaaaatatgattaccctgaccaaacggaacaaaacaacgaatgcagacgtcaggctgcaaatgcccaaagagccatatatgctctataccgacccgttgcgtctgcaacaaatcatcatcaacctgctgaataatgcgttaaaattcactcccgccagaggaagcattacattggattacacggtggacaaagaaaaacagtgtatactattttctgtgaccgacactggtacaggaatccccgaagacaagcaggaacttgtattccaacgcttcgagaagttgaatgaatttgtacagggaacagggttgggactggctatctgtaaactgacgattcaatatatgggaggtgatatctggattgacaaagattacaaaggcggagcgcgatttatcttctctcatcctatcaaagaaagggaatcaacagaaaaatgaaaaaaaatcggttgatttagtgtttttctgtttctttttcgcttactttgcccccgtaaagacaaaggggtgccccacgaggggctgagattataccctaggaacctgaggcagttagcactgacgtagggattgtgtttcttcttatcgcctttcttataaaagcacgctctttgtatttactttcaacttatttattttgataggacaatgaaagtacaagtgaacaacaaagaggtggaaataactcccggctctacccttacccaactgacagtgcaactggagcttccggttcaaggcatcgctatcgccgtaaacaacaaaatgattccccgtaccgaatgggaacgtttttcgttgcacgagaatgacaatctggtaattatcaaagcggcttgcggaggatagtaagatgatcagtctacaatttatcactcaccggaccgaacggtattcttacttcgaatcggcacgtatggcactcgaaggaggctgcaaatggattcagttacgcatgaaggacgcaccactcgatgaagtggaagcggtagccttgcaactaaaaccgctctgcaaagagcatgaagctatcctgattctggacgaccacgtcgaactggctaagaaactggaagtggacggtgtgcatctgggaaagaaggatatgcctatcgatcaggcaagacagatactcggagaagcctttatcattggcggcacagccaatacgttcgaggatgtcctactgcattatcgtgccggagcagattacctcggtatcggtcctttccgctttacaacgaccaagcagaatctgagccctgttctgggcttggaaggctatgtctctatcctcgcgcaaatgcaggaggcacatatcgagctgccggtagtagctatcggaggaatcacttacgaagatattcccgccatactacgcacgggagtgaacggcattgccctatcgggaacgattctccgggcaaacgatccggtagaagaaacaagaaggattttaaataacaactaatttataggatatggaaaagttagtaattgcgggacgtgaatttaattcccgcctttttctgggaacaggaaaattcaactccaacgaagtaatggaacaagctattctggcatcgggtacggaaatggtaaccgtagccatgaagcgcatcgacatggacgataaagaggacgatatgctgaaacatattatccacccacatatccagctattacccaacacttccggcgtgcgggacgctgaagaagctgtatttgccgcacaaatggcccgtgaggcattcggtacaaactggctgaagctggagattcatccggacccgcgttatctgctccccgactctatcgagacactgaaagccacggaagaacttgtcaaattaggctttgtggtattgccttattgtcaggcagaccctgtgctctgtaaacgactggaagaagcaggtgcggctacggtcatgcctctcggcgctccgatcggcacgaacaaaggattgcaaacgaaagaattcctgcagattattatcgaacaggcgggaattccggtagtagtagacgccggtatcggcgctcctagccatgctgccgaagcaatggaactgggtgcatccgccgtattggtgaatacggcaatagctgttgccggaaacccggtagaaatggccaaagctttcaaagccgctactgaagccggaagacaggcttacgaagcggggctgggactgcaagccttcaattttgaagcagaggcaagctcaccattaactgcatttcttgataaataaaattaaagcgtagtcgacaacctgactactcagttgcttaaaaaacaattatggaacaaagaataaaatttccccgctcccaaaaagtatatctacccggcaaactttatccgaatatccgcgtggcgatgcggaaagtagaacaagtgcccagtgtcagtttcgaaggagaagaaaaaatagctacgcctaatccggaagtatacgtatatgacaccagcggtccgttcagtgacactgaaatgaacatcgacttaaagaaaggactgcctcgtatgcgtgaggaatggattgtaagccggggtgacgtagaacgtctacctgaaatcacttcggaatacggccgaatgagaagggatgataaaagcctggaccacctgcgctttgaacatatcgctctaccttatcgtgccaaaaaaggagaagctattacccaaatggcgtatgcgaaaaaaggaataatcactcccgaaatggagtatgtagctattcgtgagaatatgaactgcgaggagttaggaatagaaacacatattactcccgaatttgtccgtcaggaaatcgcagccggacgtgccatattacccgccaatatcaatcatcccgaagctgagcctatgattatcggccgcaatttcctggtaaaaatcaatacgaacataggtaattccgccactacttcaagtattgatgaagaagtagagaaagcattgtggagctgcaaatggggcggagacacactaatggatctctcgacaggagaaaatatccacgaaacacgtgaatggattatccgtaactgccctgtgccggtcggcaccgtacctatctaccaggctcttgaaaaggtgaacggtgtagtggaagacctgaattgggaaatctaccgtgacaccctcatcgaacaatgcgagcaaggagtggattacttcacgattcatgcaggtatccgccgccataacgtacacctcgccgacaaacgtttatgcggtattgtcagccgtggaggaagtattatgagcaaatggtgtctgatgcatgaccgcgaaagtttcctatatgaacacttcgacgatatctgcgatattctggctcaatatgacgttgcggtgtctttgggtgacggacttcgtccgggctctatccacgatgccaacgatgaagcgcaattcgccgagctggacactatgggcgagttagtgctccgcgcctgggacaagaatgtgcaagcctttatcgaaggtcccggacacgtgcccatgcataagatcaaggaaaatatggaacgccaaatcgaaaaatgccatgatgcgccgttctatacgctcggcccattggtcacggacatcgctccgggatatgaccatatcacctccgctatcggtgcagcgcaaatcggctggctcggaacggctatgctgtgctatgttactccaaaggaacatctcgccctgccggacaaggaagacgtacgtgtaggggtcattacttataaaatagctgcacatgccgccgacctggctaaagggcatccgggagcacaggtacgtgacaatgcgctaagcaaagcccgctatgagttccgctggaaggaccagttcgacctgtcacttgatccggaacgggcacagacctatttccgtgcaggacatcatatcgacggagaatactgtaccatgtgcggaccaaacttctgtgctatgagactatcacgtgatttaaagaaaaacaagaaataactctaacaatatgttctcagacgaattagaaaaaatatcctgggaagagacgacaaaagccatctattccaagacagatgccgatgtacgccgggctttaggcaaatccgggcatctggacgtcaatgattttatggcactcatttcgcccgccgctactccttatctggaagttatggcacggctcagccagaaatataccatggaacggttcggcaagacaatctccatgttcgtgccgctttacatcaccaattcatgtaccaattcctgtgtgtactgcggtttccatatcagtaatccgatgaaaaggaccatactgacggaggaagaaatcatcaacgaatacaaagctatcaaacgactggcacccttcgagaatcttctgcttgttacgggtgaaaatcctgctgctgcaggtgtcccttacattgcccgtgcactggatctggcaaagccttacttcagcaacctgcaaattgaagtaatgcctcttaaaacagaagaatacaaggaactgacgaaccacggattgaacggagtgatctgcttccaggagacttacaacaaggcgaactacaagatttatcacccgagaggaatgaaatccaaatttgaatggcgcgtcaacggtttcgaccgtatggggcaggcaggagtacacaaaatcggtatgggagttttaatcggactggaagaatggcgcacggatgtaaccatgttggcctatcatctccgttacttgcaaaagcattattggaagacaaaatatagcgttaacttcccacgtatgcgtccgtccgaaaacggagggttccaaccaaatgttatcatgaacgaccgggaacttgcccaactgacgtttgccatgcgaatcttcgatcacgatgtagatatctcctactctacccgtgaaagtgcggaaatccgtaaccacatggcaactctgggtgtgacgaccatgagtgcggaaagcaaaaccgaaccgggcggatattatagttatccgcaaacgctggagcagtttcatgtgagcgatgaacggaaagcggtagaagtagaatgtgacctgaaaaaactgggacgtgaaccggtatggaaagactgggaccaagcttttgactttaaaagataaaaacggatgcgatacgacagacaaatgatactccccgaaatcggagaagaaggtcagcttaagctgaaaaaagcaaaagtactcatcgtgggtgtgggagggctgggctctcccattgccctctatctggcaggagcaggcgtaggctgcatcggactggtagacgacgaccgggtaagtatcagcaacttgcaacggcaagtgctctattccgagaacgaactggataaaccgaaagctgtatgtgccgcagaaagactttccgcactaaacagcggaatcagtatcctgccctattccacccggctgacagaggaaaatgccggcaatatcatccgcaaatatgatatcgtagtagacggatgcgataatttcgccacacgctatctgattaacgatatctgcattgaacaaaggaaaccgtacgtatatggtgccatctgtggttttgaaggtcaggtttcggtatttaattacggagagatgaaaaagagctatcgtgacctctatcccaatgaagaggaaatgaagcgaatgccacctccccctaaaggagtaataggagtcactcccgccgtcgtaggaagcattgaagcaacggaggtactgaaaataatttgtggattcggtgatattttagccggtaaactatggacgattgacctgcggacattgcaatctaacaaattttcactataaacgttggtttctgacatagttaattattaactttgctaaacaattcaatttagcagaaagaaatgaaactaattgtagttaccacccctaccttcttcgttgaagaagataagattattactgctcttttcgaagagggtctggatattctacatctcagaaagccggagactccggctatgtattcagaaagactactgacacttattccggaaaagtatcaccgccgcatcgtgacacacgaacatttttatcttaaagaagaatttaatctaatggggattcatctgaatgcacgtaatcccaaagaaccgcatgattatgcgggacatgtcagttgttcctgtcactctgtcgaggaagtaaaaaacaaaaagcatttttatgattatgtttttatgagtcctatctacgacagcatttctaaagtgaattactactccacatataccgccgaagaactacgcgatgcacaaaggactaagattattgactcgaaagttatggcattaggtggtataaatgcagacaatttactggaaatcaaagatttcggatttggaggagcagtaatattaggcgatctttggaataggtttgatgcatgttccgaccaagactatttggctgtgattgagcacttcaagaaattaaagaagttagccgattaaaaaggagttggtattatccggataaagcgtagatacgaaaaaagccgctacaaattatcttcatagcggctttctttatttgccaatattctgtttttagaacttatatcctacaacaatagaaaagttcatattcttcggattgcccaacttctgtacatctaccaaaccgaattgtccatccaaacctgctatgattctaccaaattccaatgctacgccaacaccgagacctgcatcaaaacgcttaaaatccacaccatcatcactaaacgttttcacactttctccggctatcttcgtttttcctgcaataccgcatgcgaaataaggacctgcattcactactaaattggtattatcagcgacattgaaacgagctgctcccattatcggcagttccagataataagcattgacagtaagcgcatctttcttagcacctttaccggtcaaaaacaaagaaggttgcaatgaccaggtatcatcaaaggcatattcaaaacctccgccaagcttgaaaccaaccttagcattcatatcaagatcacctgtgtaattactgaagttcataccaacttttgcattccaacctgtaatttgtgaaaagcccgcaactgaaatcagggcaaacaaaacaaacaaaatactcttcttcataattttaaagttttaaattaaccttaattccgcaacactattacaaatataactttttaagtacctgagcaacaaaaagttgctcaggaatttgccatgtcagatttttcacctatcttagtgttgcaaatcaaaatatgtatcaaacccgacagacatggcaaaggtagcaattaaatccgagaaactcactccttttggaggaatattttcaataatggagcaatttgactccagactctcatctgtaatcgactcaaccctcggtatgagatgcaggctgtatggttatcaatacagcgaaatcatccgttcgcttatgagcgtttatttttgtggcggctcatgcatcgaggatgtcaccactcatctgatgtaccacctttcgcttcatccgacacttcgcacatgcagtgccgacacgattcttagagccataaaggaactgacccaggataacatttcctacacatccgacactggcaagacctacgacttcaacacggcagacaagctgaatacactgctcctcaattgcctattgtccacagggcagctgaaagagggcgaggggtatgacgttgacttcgaccaccagttcatagaggctgagaagtttgatgcgaagcctacatacaagaagttccttggttatcgccctggcgtggcggttattggcaacttgattgtcggcattgagaacagcgacggcaacacaaatgtccgtttccaccagaaggacacgctgaagaggttctttgaaaggtttgaacaaaacaagcttattatcaaccgtttcagagctgattgcggctcgtgttctgaagagatagtggaagagattgctaaacactgcaagaccttctatatccgtgctaaccgatgcagttcgctctacaatgacatctttgccctcagaggttggaagaaagtggaattgggcggcattgagtttgagctggcctccattctcatcgagaaatggaaagggaaggcataccgtcttgtgattcaaagacagaagcggatagacggcgaactcgacctgtgggaaggagaatacacctaccgctgcatccttacaaatgactacgagtcttccgagaaagagattgtcgaattctataacctccgtggagggaaggaacgcatcttcgatgatatgaataacggattcggctggaacaggcttccaaaatcctttatgggagaaaacacggtgtttcttctgcttatggcactcatacgcaacttctataaattcatcatggcgaggcttgacgtgaagaggttcggactcaaagcaacaagccgcatcaagacgtttgtctttaagttcatctctgtgccagccaaatgggtcaggacatcaaggaagtatgtgctgaatatctattcatgcaacaatgcttatgccaatgtgttccagaatgactttggataacaccgacaacttatagtcgtgattttgcgtattgcctcaagtcgcatggtggggtaaggggcatttatatgtctttatggtgacattcgatgcactgtgccccctttttactaacgatgcagattcttttcgcttctgtatcatattaggcgcgtagttgcggatttgaggattaatacttaaagtctttatgacctcattgtttaacaatacaaatgtatgattgtaatttgtattaaccttaattccgcaacactattacaaatataactttttaagtacctgagcaacaaaaagttgctcaggaatttgccatgtcagatttttcacctatcttagtgttgcaaatcaaaatatgtatcaaacccgacagacatggcaaaggtagcaattaaatccgagaaactcactccttttggaggaatattttcaataatggagcaatttgactccagactctcatctgtaatcgactcaaccctcggtatgagatgcaggctgtatggttatcaatacagcgaaatcatccgttcgcttatgagcgtttatttttgtggcggctcatgcatcgaggatgtcaccactcatctgatgtaccacctttcgcttcatccgacacttcgcacatgcagtgccgacacgattcttagagccataaaggaactgacccaggataacatttcctacacatccgacactggcaagacctacgacttcaacacggcagacaagctgaatacactgctcctcaattgcctattgtccacagggcagctgaaagagggcgaggggtatgacgttgacttcgaccaccagttcatagaggctgagaagtttgatgcgaagcctacatacaagaagttccttggttatcgccctggcgtggcggttattggcaacttgattgtcggcattgagaacagcgacggcaacacaaatgtccgtttccaccagaaggacacgctgaagaggttctttgaaaggtttgaacaaaacaagcttattatcaaccgtttcagagctgattgcggctcgtgttctgaagagatagtggaagagattgctaaacactgcaagaccttctatatccgtgctaaccgatgcagttcgctctacaatgacatctttgccctcagaggttggaagaaagtggaattgggcggcattgagtttgagctggcctccattctcatcgagaaatggaaagggaaggcataccgtcttgtgattcaaagacagaagcggatagacggcgaactcgacctgtgggaaggagaatacacctaccgctgcatccttacaaatgactacgagtcttccgagaaagagattgtcgaattctataacctccgtggagggaaggaacgcatcttcgatgatatgaataacggattcggctggaacaggcttccaaaatcctttatgggagaaaacacggtgtttcttctgcttatggcactcatacgcaacttctataaattcatcatggcgaggcttgacgtgaagaggttcggactcaaagcaacaagccgcatcaagacgtttgtctttaagttcatctctgtgccagccaaatgggtcaggacatcaaggaagtatgtgctgaatatctattcatgcaacaatgcttatgccaatgtgttccagaatgactttggataacaccgacaacttatagtcgtgattttgcgtattgcctcaagtcgcatggtggggtaaggggcatttatatgtctttatggtgacattcgatgcactgtgccccctttttactaacgatgcagattcttttcgcttctgtatcatattaggcgcgtagttgcggatttgaggattaaacaactttttcgttaacaagtgcataaattatagagtttatacataaagaaagggaattccctatttttgggaactccctttcctattttttgttcgatttttcttatctatcagaatgcgtagtggaaaccgattgaaagatcttcgctagtaagtttaagaccgaaagaatctccgggagtgtttacatttctgcggtatcccaagaaaccatatttagcaataaaagagaaatgatcgttcaattttacagcaatacccggtctaaaaccaatctgtcctgccttgctggtatctccgtcttttaccttcacaaaaccaatggcagcagctccgtccaagaacaaacgaacggcatcgttttgataataagaccaacggatatacggagcaacagagaatgcatttgttgataagcttccgttatagtcatgtgaataatccaattcagcacctaacgcccatgtttcgttaaagttatatccgatttccggagctactttaaaagacgtagtattgcctgtgctgttacgccaaacgttgaaagatccgcctacgtaaatgtcttgtgcttttacagcgatagctgccaccataacaactatcaataataaaccctttttcatctcattttttttaaattaaacaattagaccccactcaggtctgtttttcgaggtgcaaatgtaaagctgtttttaggattaaacaaatatttagttagttttttataataaataccaaggatttcctcagaagcaccggatatcaaagcaaaaacaaagacaaaataaaataggctgcgaatactttcacaagtatttacagcctatttctttagatagttaagtacctaaccagtgtatttagctatccctcaatagcagcctgcgcctcatttatttgcatttgactatcaacatattcactatttggtgtatgtgaagtgtatgcactttcccgggcttttcacagactgcataggaaaatcgagtttattcctctacggcagcttgagcctctctaatttacatctaacattcaataagttattaacttagtgtatgcaaattgtattctcagttcttagagaaacactttcgacaatattcaaaagcaacttttttctttcttaaatttgatgacttctacaaatattttggctatgcagcgtcctcaaatctacaaaatacaagtctcaatctgaatttagttaatgaattacctgtataataacattgcgcatatattataaggtatatttataatgattttatctcctttcttttaagagttctataatagcatccttatcctttaagttggagtccagacgattgatttgtgcattcaaactatcaatctgttctttcaaaagtttgatagtttctttttggctttcagtttctgaccgagcctgagccaactgactggcaagttcggcatcgccaataatgttatgggcatttccttccaatgctactgccgcaaggtatgcggaaatttgatgctgaaccggacagaacagcgagaagaagttaaaatctaaaacctcacagaccctaacaagccgtttagtctccattgtctccctctccaatatgcggttaacgtgctgttggggaacgccaattctccgggcaaattcagacttgctaagcccaagctcgttgcgacgtctatctatcgcttcacccacatgcacgtattttacatctacatccatagattttaatcattaattgaatcttaaataataaatcatcaaacgaatatttggatagataaacctttttatgttactttgtggcgttatcatctcttttatagggacaaagttaaacattaaatattaaacatccaacaattatgactgaaaacttggaaaaaatccgtccggcacttgtagccctcgaagtaggcgattctgttacattccacatttcacggttgaaaagcgtccgcacgcaagcctcagaactgggagcaattcataatcgtcagttcaagacgaagacaaacagggaagaacaaaccataatcgtcaaacgtattctgtaagtatggcattctttcagtttatagaccgaattatcccgtatgagaccttcttggaagacctttctgcacggattgtcaagatgctaaagacggatcatgacgacccggaatttatcagccaaaggaaagcatacgaacttttcggtcgtcgtaatatcgaaagatggaggcgacagggaaaagtggaaatatacaagaggccgggcaaggtggaatacaggactgccgacctccgtcttttgcaacgcaccgttcaagactatttcgacattccatcgacagaaaataaaaatagatgcaagaagaaacaaggaaagtaaaccaaattgtggctatatccgataaagaaactgctctagcggtatagctattaccagcatttttaaaggggcagtataaaagtaagcaggtaaatgttatatgaaagaaattaaaccaacgtgcgaccccaacggagtctattcggttaagcggacttgtgccgaactgggtataagcaacaagacactccgcaagtacaggctgaacggctatatccagccgctcaacccgaacaacacctaccgtcccaaatactccggacagtcaatcattgagtgctggaacattctaacaaccttatgattagcgagtccgtcattcaaaaagtcaggaatcttgccattgaagaggttctccaatcctacgtcaaactctcacggaaaggttcgacgctgatggggctatgccctttccatgcggaaaggactggctcatttgttgtaagcccacataaaaatctgtttcactgtttcagctgtaaccgtggcggtgataccattacttttatcatggaaaaagagaatctttcctttataaaagccgtggagtttattgccaagcagcataacattcctgttgaatatattcaagaagagcgaaatgacgagcagatagccgaagctaagcataaggaagcactgttgactgcccttgactcagtacaaggtttcttcgtagagaatttaagacatacggataacggggaatgcagtaaagcccgggaatatgcgtatggcaggtggacggaagagttttgttccatggtcggcattggctatgcacctcaaaacagccaagcgtttattgagtattgtcaacgaaaagtacttaatgaagaactgctgtatgaattaggaatgctcaaacgcaatgaggacggcaatacttatgccatgtttcgccaacgcatcatgattcccatacggaacaggtggggacgcattatcgcctataccgcccgatacataggcgacaacaagaacgctccgaaatatatcaactccgcaacctgcccgatttattccaaaggggaaaacctgttcggcattgaccgggtcagtcgcttgcgcaatgtggattacatcattgttgtggaaggtgcgcccgatgtactaaggatgcaatccatagggtatgacaacactgtagccgcccttggtacatcctggactgacagccagtttgagcagctgaaaaaatacgccgcttcgttgtgctttataccggattcggacattgccgaaggaaagttctacggagctggcttcgaagcggtcatggcaaacggtgcagcggcaattaaaaaaggattccatacgacagtcagagaactgcctttcctgaaagttccagcaactgacaaggaattggcaagtgaagtttcagaggtaaaatacgccaaaaatgatgcagacagtttcatccattgcagcgaagactatacttcgcttatggaaaaacacttcatcatttggttagcccagaaacgtttccttgtggcatcctccttggtggaagaacggaaatgcgtggctgagatagccgacctgttgcgctatatcaaagaccagttagtgtttgaccagtgtatcgaccagttggcaaaactgcacggtaaggtgaaactgtggcgagatgccgtcgttcaggctcgtggggaagcccggacgaaaaatgacttgccgtcctccatgaatgacctgcaacgcgaagcggagctactgcgtcagttcggtctgtttgtccgtgaaaactgctattatgccattggagaggaggacgaggattcgatgcgtatttccaatttcatcatggaaccgctgttccatatagaggacgagagcaacggaacccgtatctttcggatgcggaatatatataacgtatgccgtgtcattgaactgaaggaatccgaactttgctcgttgagcaatttccagcaaaaggcaggttccttaggcaattatgtgtggctggcgaagattgacaagctcaaccgtgtcaaggaatacctctattccaaaaccgacacggcggaacgcatccgaaaattaggctggaatggtaccaaaggcttttttgctttcggcaatggcatactggtggaaggtgcgttcaggaacgttgatgacctcggtattgtccgtggcgtcaatggaaaggcattctatatacctgccacatccaaaatctaccttcacaatcaggaaatctttcagttcgagcggttgatggtacatgagaaccgcaacggcgtgaaactgtatgactatgtatcaaggctaacggacgtgtttggcgaaaatgcttccattgctttctgctatctgctgtccaccctgttccgggacatcatattcaaacgtacccgtcatttccccattctcaacctttttggcgagaagggaaccggtaagactacccttgccacctcactccagtctttcttcctgcacggcatagatccgcccaacttgggcgttacttccgtgcctgccatgaacgaccgagtgtcgcaggcggtcaacacccttgttgtgcttgatgaatacaagaacgacttggatatacgcaagatcgcctacctgaaagggctttggggcggtggcggtcaaaccaagaagaacacgaatactgatggtatggctgcccaaaccattgtaactacgggagtggcactatgcggacaggacaagcccacgcaagacatggcactctacacccgtgtcatcttccttgccttctccaaaacctcgttcaaccaaatggagaaaaggcattacgaagatttggtggctctctgcaacttgggactgacccatctgacaatagaaatcctgacccatcgggaactattcgagaagaatttccccgaaatctattccatcaccaaaagagaactggctgcaaagctggaaaacgaaactatccatgaccgtattttcggaaactgggtgattccgctggcaaccttccgcacgttggaaacagtgatagatgtacctttcggctatacagagttattcgagaccgccgtcaagggaatacgcaaccaaaatgaactggcacaggaaagttccgaggtagccgacttctggaatatgttgcaggggttccagacttcaggaaaatgtatcgacaaggctcattaccacatccggtatctgaaagcgttccgtcccctatccgccaaggaagacatcgagttcatggaggctcgtcctgttctgtatctaaacatggcagctgtggcatccttgttcaacagccggaacatgaacgctaccgccaaccgttccaattggtccaccattatgtcatacctgaaatcgcactcgtcctatttaggcttgaaacaggaccggtttacgattctgcttccaagcggtttgccggactatacgatagaggttgtcaatggcgaacaagtcaggaaagtcaaagtgaatcgtccgaaggctctttgctttgattatctgcaactaaaagatgcgtttggtctggaattggaaacagaagtaataactgatgtgcaagattcagataacttttaagaatcagaaatttacgataaatagctaataattagtgcgataacactaatcataccttgctgagaatattgccaggacatcaacaagcaatattttgttcactaaatcaagcctgttcataaattcgtgaacacaaggaaataatgaacataagacttgctcaaacaagaaatgttcactaaatttgcactgttcacgaatttatgaacagtgtataaacaatgaacaaaggaatataaatatgggaactgactatatggaattatttcatgaagctattaataacttgaaagtagcgacggggaatgacaatattaccattgatgataaaatggataaatccgtttgcattaatggtataggattttgttgtgaaatcaagaaaaccataagcaacgccaatgtcttttctgtcatagatagtatcaataatatgaacgatgaaggtatgcctatgattctaataaccaacaaactctatcctaagttagccaatacgcttgcggataatcgtataaattggatagacaaagctggtaattgcgacatcaggcatgaaaatctgaccatcaagatttccggacaaaaaaaaataacttcgggtaatacaagtagtgtatcaaaaacaagtgagacaaacatcaaactcatcttgttcttcctgcaaaatcccgaaagcataaactggtcatatcgtgaaattcaggaaaaagtcggattatcccttggcactattacaaaagcttttgatctgttgaagacgaagcgatacttagtgcaaaccgataaaggaagacggattgccatgcgtgaagagcttattgagtggtggcaacaacagtataatgagttcttgaaacccaaattactcattaaccagatgagcttccgcactccggacgccagaaagaaatggaaagaaatgctgcttcctgaaggaatgtattggggcggcgattgtggtgccaatttagtggacggttacttgattccgggcgaatttgaaatttattccgaggtagtgagttcattgcttcttcggactggtgcggtggtgcctgaccctaatggagaaatacgtatttacaagaagttctggataggagatgagaaagaaaaattggctcctactttagttatatatgccgacttgatgggcaccggtgatagccgatgccatgaagccgctttaagaatcaaagaaaatggaatataaaattacgcgagacgcattacaaaataatctgctttatgatacctttgaggcattgaacagagtgatgaaagaccttcaactggatgtgtatgttgtgggcgcattggcaagagacattgctatggaaattcttgaaatgccaccttcgcctcgaagaactgccgatcttgatgtggcaatcgcattgaaggattggagtcagtttgatttattgaaggaacatttattggaaaaccattttattaaaggggaaccgaaacaacgattctattacataggtgcagatggtaccaatgattatgaaatcgacatcgttccttttggagaactggaagctgacgagaaagtggcatggccgcctgaaggcaatccggaaatgtcggtcaaatgcttcaaagatgtaatgagcatagccgatacggttataatcgatgatgctattactataaggatggctcctttatccggacaatttctaataaagtttgacacctggctcgacaggcatttacttaccgacaaagatgctgccgatatgctctacataatggataacttctatttggcaaatgtgtcgttcaagcaacctgttcctgacgaagttcaagatacaagtgaaaacttcgaccttttgacaggtggggccagttggattgcctgtgaaatgagagattttcttaccaaagagcatcttcaattctataccgaccaactgcaagagcagattgagttggatgaaagtagtccattaatcaactctatgagtagcagacattccggaagcgacgcgcatcaaattatcagaaatgcacttattggaatggttgaaatattaaagaaagaagaaagcgatgaagatagatagtttttcaatagaaggcatacattattccaatgaagatagtttgtctgtccaccagttaactcccaataaagctgtagcagtattggcagacggcatgggtggcttgaccttcggtaaggaagcggcagatctgattgtaagtacaatcactgcctttatttgtgagcatgtggaaagattgcctatacaaaaattgttgggtaaagcgttggaatatgccgatgaaactatttgtcagaagagcatggaaactcacagcaaaatgggagcagctgttgccatagccttcattgttggcaataacattcactatacttggctgggtaatgtcagaatctaccttttcaaccacgataaagcagaacaattaaccacagaccatatattggatgctggatatggcaaatatttgcttacaagatgtataaagggagcaggcttaagaacagatataccttatcaatgcagagaggtcaatacaggaaatgtacttcttctttgcactgacggattctacaagcaaacagaggtcaatcaaatgtcagatacgacatcccttgtaaacaaggaatacgaagatgatgcttctttcataaagatagtattataatggcaatgtcaagcataggctggaacataggtcgattggtctgtaaagaaggcttgctcgtaacattctgagcttcccatatagcaaattaaagtgcaattcctgcgaaattttcgcaagaattgtactttaatttatcagcattggcttttaaacctcccttaatccccaatttcgtaaaggttaaccacctccatccctttgtcccgggctttcccacaagtataatatgtaccccctttcggcttgccgtcaaagtaggctatcacaccacaagagtgcgccagcatatagtcgtttcgtctgagcaagcatccttgataatagtgctcactcaaaacaacaaccttatctgcctgggcaagaagtagcctatatcgtctttgttcaatggctgaccaccggttggattgtccccgaaagggaacgacagctaccaacctgacatggagcaattcctctttgagagaaatgattgcttctgccgccaatctatcaaaacccaaagccataccacaataaaaattgtgtttgccatgtttgtaagcatgggaaattgcagcctttagccgttccctcactccatccatttgggacaccggaatatcccgatgccccgtgaaggctatggactcagcctttatcagttcaagtgtttccatattcatcttaccttataatgagtttttgccaaaaagatgcccccaatcacattcgcaccaagactttcaagttggttggcataagtaccatagctaatgccacgagagataacatcgtcaaatgccacgatagtcttgccatcgaaccattcttcatcaaattcaataatgttcactttgcggatagctttctccgattttcggttctcatggatagccaagcgttccccacatactttcacatggtcgtagccgttgatagctccggacagttcgcacaccctttcacagaaggctttgtatcggagttcgtgtttctgacttgttgatgccgggactggaacaaacacgatgtccccacaagaatttccatactgcgccaccatacttgatgccgtcatttgtgccactgtctcaaaggctcttccatccttgaagtcataaaccatctgcctgtcggcaatttccttttcacccacgtttcggatgcgtttgggaaaatatttgcagaaccatgtctgcggcttttccaactgctttctgattgtatcgtccatctgtgccatacgttctgattgttttcccttttgtttgcaagttttcagcttgcccgaagggatattttttgcttttcagaacgcaggcagtcaataagacaaatcaaggagtggaaaatacgctcaacttgattgaggaagattttgtgctacggatttgatgtttgacgatgcctgcggcaactttgcaaaacaatatccagagaggcgcagatgaacaaatgaaacaggatactttcattacctttttatctatgaatgtccgtttgaaaaaaacattcctcgaaatataaaatgtacacattttgaggttgacagcgttgacaaagacctattcattgagtatcaattgcatcaatcccagaacctgcgttgacaaacgttgacctgcgttgacaaaatcaggtcccagtcaaaatatcaaagccaagtgttgacaaaccatgagttacatttcttattctttattttcttaaaaaagtagaaatgtattgtattacaggggctttcacacagccttcattagccgtttcaaggctatcacctttgtcaacgctgtcaaccctgaaatatatgcctttttctatctgagaaaacacatagccctatctgtactcttcgctaatgagaccatcactatagaatcaaacaagagtccttcatattcctacaaaatcccacaaactcctatatgttcccatgtttaacctcttgcagaagatgcacatcatcagtagttttacaagaaaaacgaattatggttatacagagatattcaaatgagatggagccggaacgaacttattccatcagtgaagcggcacgctaccttggcgttcatagatgtacgctctatgcttacatcaaccacctggagcatccgttaccttttgtcaaagtgccggaaacaggaaagctcatgttttacggaagagatttgattgcttacaaaactactggtcttcccaagaggggacgcaaacgaaagaacggaatcagttaattccatttataagaaaagaaaaatacaatatgctaagagcctgtttaatttgtcctcaataataatcttatggtggctaatttgagcatttcctctgccgaatcgagtgttagttcatagtttcggcagtgtaatccatccatgagaatgttctttccacaatccatctcttttgaatgggtctgaatccctgttccttttatgcgctgataacaacttgaatgacatatccgaatttctttcttatgttatcgacaagttctccccgatagcctccatcggcaaatatagtttttacactgggttccatgctttgacctcgtttcacacgtatatgcccacgtaatctctagcaacaagtcaaaattcaatagggaagcccatttgagatagtagtaatagaccaactgtcacttgggaaagtcaaggggaagatccgacattgacaacctgtctttaccaggtaaaatatagcgttctaaatcaattgtaaatcatatttttgcttcctttcttgcaggttcaatacttttgttatatattgctactcggtttccgttaaatctgtctgatacatcttttttaaagtttggtcgcttcaaagaaagaaacgatcagacggatacagaaaccttttagaaaaagatttcattcatttttgaacaggctctaaaaatactttatatggaagaagaaatggaatttgagtccattgaggattatcagaactacttgaaacaacgtcaggaactgctggcttactgcaagaagattaatcaaggcattgagaatcttgacgaaaagagtggcgagcgcgccatctgggaactcgtgcagaatgctcgggatatggatgagaatagtcgtattcgtatcgaactcaaacctgataagattgttttctcacatcatggcaagccgttcgactatacatccctcttggctctggttaaccagaatagcagcaaagacaaccctggggcagaccttgtaggtcagtatgggactggattcatgactacacatgctttctgtgatattgttaaggtgtcagcaccatacaaggtgatgagtggtccggaaaagttgaaaggttatgtctatatgcaaaattttgaattgaaccgctcatacagaaacgatttggagaaggctatctgcgaaatgcgtaaagagatgaagctggtggatgatatgcataagacccttcccttatatcaaaaatacgatttgttgggtgagaagcagaaatggacttcttttacctaccagcttgagccgtctgtagtgaattctgtttccagacaattggcaagcgccataagattgatgccgtttgtactggtgattaacgaacgcatcaaggagattgaggtaaatgatttgtgcgcaaagcgtcatttccgtatcatcaagacaaacagcatcgataagcagaggatggaaggggacacggaatggtttaaggttgttaatgaaatagagacaactgatatgcttactggcaaaagtacggcgatctccgtagtcagtctgcagtcattcaatgaggaaggtaaggtgaatgacgtagtgatattgccgccctatccggaatcttgcggttcggtggatactatacccggtttgttcttgtggtttcctctgcttggcacagagaacttcggtgtaaacttcatcttccactctaagcgttggcatcctgtagagaaacgcaacaacattatgctacctgagaacgtatcttcaaagcgtgaaaaaggtgtacataacgaaaagattttgcatgagatgatggccgctcttcatcggttttatgcctgtgaaggcaatgctagtgctttgagtcttgacatgtgtagtgttaatttccatagcgacaaggatgacgagattactataaggttttataaggatttgcaggacatgtggaaggctgttgtgccatcgtggaaagtaatacctacggatgacggtttgaaagcaatgaatgatgctcgcgtcagagtgttacatcctgatttttacagcaaattgacggacgagaaacgaacacaatatgaactgacgcttgccgaatatgccaagaacgtaaagcgcaatgaggaggagtgttacctactgcctacttcagacctgattgcatggtctgaagtagttcatctgtggcattgtaaccgcgatagcgagttttacgttaccgtcaagaatgtctgtgaatcggttcgggcgaaatcggacaacctgcatagctttctttcatttcttgtggatagcgataacataaccctgctagacgattatgagctgttgcctaatcgcaaggggaacttgaagaagaagggtgatttgcgtcatggcgattttatgactaccaaactctatgcactgaccgagatgctgatgggtagtgatgccgaccggatgattgataccgcctataacgagattggtaaagtggctacatacaaaccagaggacttgcaacgttctgtcagccaaactataggccaatggcgtagtgctgctttgggtagcaacaagacacctttgactacagaacaactggaggctttgattgcatttagctctgctacttcgcagactgagttcaacaactttcgcggccgaatgatgccatggatagtacgaatccacgaaaagcagttcacctgtcttgctcagcaaaaggttatcgataaggaagatgatttctataatcctgcttttaatttgcttcttgattacacgctttatgtaatcagtcagaaggatgaagagtgggttaaggacaacgatcagctgttgaaggatttcttgacggaatatgctacaagtaacgcaaaggagcgcttggaacgtttggatgagttcgctgtgatacccaactataactaccagcttcgcaccaagaaagagctctgcaagaatgtaaatatacatgaagatctggcaaagttctacctagatgtaattaaagaagatttgcatgaacattgggtacatgataactttaacactatttttgtctataatgaagagaaagctcaggaagtagcgaataaaattcagacggctttaagcgaagaagactttcaggacacagtagttctggatatcattgagttggcagaaaacgagtccatcgacagttggaaaatcctattcaagtcgatttataaccaacgtgaatctatccgctacaaacttggtacacctgcagagcgcaaggctatcaatcgtatgatgaagaagaagaatccagaattgttggaactgatggctgacgttgcggaacgtgaggacgctaaagatgtgataaataacgtgaatgttgtcatagctcagatagaacatgatgcttatatcaagatgcttggagcatatgtcgagagtcacatacaaaaatttcttatagaggctttggaaccgattggcatttttgtcaataacgagcaatgtggacaagacttcattttaagcaaacaagggtatgaagactatcatgtagaggttaaatcccgctgggaaaatgaccaatcggttgagatgagttcaacacagttcagatgtgctgtagatatgcctgatagatacgctctaattagtgtgaacatgtataagtttgaccgaagtcgcgccgaaaaaaataatccaatggaaatgtccgagatatatgataaccttaattccgcaacactattacaaatataactttttaagtacctgagcaacaaaaagttgctcaggaatttgccatgtcagatttttcacctatcttagtgttgcaaatcaaaatatgtatcaaacccgacagacatggcaaaggtagcaattaaatccgagaaactcactccttttggaggaatattttcaataatggagcaatttgactccagactctcatctgtaatcgactcaaccctcggtatgagatgcaggctgtatggttatcaatacagcgaaatcatccgttcgcttatgagcgtttatttttgtggcggctcatgcatcgaggatgtcaccactcatctgatgtaccacctttcgcttcatccgacacttcgcacatgcagtgccgacacgattcttagagccataaaggaactgacccaggataacatttcctacacatccgacactggcaagacctacgacttcaacacggcagacaagctgaatacactgctcctcaattgcctattgtccacagggcagctgaaagagggcgaggggtatgacgttgacttcgaccaccagttcatagaggctgagaagtttgatgcgaagcctacatacaagaagttccttggttatcgccctggcgtggcggttattggcaacttgattgtcggcattgagaacagcgacggcaacacaaatgtccgtttccaccagaaggacacgctgaagaggttctttgaaaggtttgaacaaaacaagcttattatcaaccgtttcagagctgattgcggctcgtgttctgaagagatagtggaagagattgctaaacactgcaagaccttctatatccgtgctaaccgatgcagttcgctctacaatgacatctttgccctcagaggttggaagaaagtggaattgggcggcattgagtttgagctggcctccattctcatcgagaaatggaaagggaaggcataccgtcttgtgattcaaagacagaagcggatagacggcgaactcgacctgtgggaaggagaatacacctaccgctgcatccttacaaatgactacgagtcttccgagaaagagattgtcgaattctataacctccgtggagggaaggaacgcatcttcgatgatatgaataacggattcggctggaacaggcttccaaaatcctttatgggagaaaacacggtgtttcttctgcttatggcactcatacgcaacttctataaattcatcatggcgaggcttgacgtgaagaggttcggactcaaagcaacaagccgcatcaagacgtttgtctttaagttcatctctgtgccagccaaatgggtcaggacatcaaggaagtatgtgctgaatatctattcatgcaacaatgcttatgccaatgtgttccagaatgactttggataacaccgacaacttatagtcgtgattttgcgtattgcctcaagtcgcatggtggggtaaggggcatttatatgtctttatggtgacattcgatgcactgtgccccctttttactaacgatgcagattcttttcgcttctgtatcatattaggcgcgtagttgcggatttgagggataatatcaagtgccttgataatatcggcacacttgaagcagacctgcgcaaacgtgcagacgaggcatttaagggaggggaacaagatatacgattggacggttcatacaaggtgcgcgtgcctcaagacgtattcaaggctcatccactcgacttcaacggattattagaacgtataaaaaattactttacttagagcctgtttaaattttcctcgtaataatcttatagtggctaatttgaccatttcctctgccgaatcgaatgttagttcattgtttcggcagagtcttctgttgtaatccatccatgagaatgttctttccacaatccatctcttttgaatgggtctgaatccctgttccttgtatgcgctgataacaacctgaatgacatatccgaatttctttcttatgttatcgacaagttctcccctgtaacctccatcggcaaggatggtttttacactggagcgcatctctttaagaacccgaatcagcaaatacgcggctttactgtcatgcacattggctatggtgaccataacggcgataagaaagccattcttatccactataacatgccgttttataccttttacctttttgtttccatcaacaccgttcaaagaagcattgttttcctatttaacgctttgactatctataattcctacactgggctccatactttgaccacgtttcacacgtacatgtccacgtaatctctccaacaacaaggcaaaattcaattggaaggcccatttgcaatagtagtaatagactaactgccacttggaaaagtcaaggggaagcatccggcattgacaacctgtctttaccaggtaaaatatagcattccaaatcactcgcgaatcatattttcgctttctttcttgcaggttcaatacttttgttatatattaccactcggtttccgttaaatctgtttgatacgtctttttttaagtttggtcgcttcaaagaaagaaataatctggcggatacggaaccctctttagaaaaagatttcagccattttaaaacaggctctaagtatgtgtataaatgtatggtgaaatgagacgaataaaacggtcattgatttatagcagcctttgcttgttggcattgggttgcacgagcaggtcgcgaacactaccggagtttccgtctgctccttccagagaggcttttgaaggatttcgttgggaaacggtagagggtaaggagctgatgttttgggcacagcgcaatgaggtaatccatgtgatggtggacgatgccaaggcggaagccgggattgtggacgacggagaccgtgaggcctttttcctgacggtgatcaaggtattccccctgccttcgggagaaatcgaagagcttctttcggtgttacgacaaacgcccgaatgggacccgactgtcagttgcggcttccgtcaggttcgttcaagccgggaaggcgttacccgttatgtcttggagccgaccggcgcgtcggccgagaaaattcaggagttgtcgaccgaggaaccaatcccttccacgtgtggcggatggggcgtagggaatagcggtatgcgctattttgagatccatgatagccatccgaagcaggtgctctttgtggagatcggccaagacgctcccctgtttgacgagcagagtattgttttgaaatgaatattcaagaaggatgacagggcttttctatattgattgattgtttgaatgattttgaagggcaatacctttaatataatgtcagccataactgatgaagctgtggctgacatatatcgttcaatcttcaaaccttgcaaggaagtgttacagtcgatggtcattcagcctatccaaccgaatcggctgaaagttgggctgttgccgaactcggagtttgccaagaccttgtgccgtgaggtcaacctccacttctgaaagttcgtttagcgaaacatagccgtattcattctctgcaagtccgatgacaatgccaaacaaaatggtgtcgtttccttccgtttctccttcaagtatgaaccaacggatgccaccgagagcaaaaatcacacaacaaacggcatttttcctcttgccgtcttggaagtaaagaggaaagcttttcaaggcttcctccaattgggggggctttaacctgcacatatcaatcaaattctatttcgtcctcatatacttctatctctgctccactgctgaactgcacgacaaagccgcttgcagtcctggcgatgattgtaccacgatgatagccacgccatggagttatcagttcacacagccgtccgtattccggaaaatcagtatcagtatcgtccattgctcttactttttgaaattggggtcataaatgatttcactctcaatcagatgggtgtacgtttccgatgcaagttgtgaagcccacgcattgcgttcatcataagcaccctgcttatagttgtatgccaactggcgcataaaacctatgaacactttgaacatctgctgctggaggtagcggtgtgctctggtcagttccttgccggtctggtcggcggaacacatccgtccattcacgaagttggcgaactcttgggcaaaagccttgtcttgttcggagactgttgctcctgaaaattcctgatagtccatattgctacaattttaaaaggttgcttgataataaatatgcggttcggatgatacattatagatgtagtccccacaacgcactaacagacatttgctgccataatagagttttttcatgcctctcacacttccggtcttgtggaagtttgggaaacggcttagtccagctcccataccttgctcgattgtcattcttcttactcgcataatcatttcgtttttggatttcaattcttttccctcttgtaaagctcctttgagcctcttggtcggggaaaccgtttttcgtgcgaagttccattgtggacaaaagggagaataaggcaagtgtgaggtcggagagtgcggacggaataccccaattttggaggtacgagaaaatttgtggaaggttgccgtcaagccctccaaccgaaaacgccagtgccacttgacatttctcctgtccgcaatacctttgcacgataaaaacggtcttgaccaagaagctcaaatggttgtcgaaaacacttgctccaaacttatccttttaagcacataacagatggttacagccgatgcttccatacctcgttgtcattgtgaggacctacaaaatgaaacacagtgtagtcttgtaggttctttctatgaacaacgatacggagtttttgtccggtaatactctatacccatcagttaggatcaacttggtgttgaagacacggagttgaccaactacaagaattttcctcatttatgaaaacatttggcgtaattcgcaaatatatttttctttttccttaaaatattattgagagatccagactttttgattatttttgccctaatcaatgatacaacagattcattatggaagagaaaagagacataaatcgcttgaaagtagtattggcagagaaaaaacgtaccaataaatggttggctgagcaattaggcaaggatcaagctaccgtttccaaatggtgtacaaacgcctcacaaccttcacttgaaatgttgctcaaaatagcagagacattggaagtagatatgaaagacctgttatggccattaaaatagacttcttatttcattagaataataagtattgatgtatggaacagcccaaacttatcgataacatccatgaatgcgtggtagatgacctgaaagaacggttatccaaaggaagtcgcatatccgtggctgccgcctcgttttccatttatgcgtttgaagccttgaaaaaagaactggaaaatgtggaagaacttcgtttcatattcacatcaccgacctttatcaaggagaaaacaaagaaagaaaaacgcgaatactatattccgaaactcaatcgggaacgcaatctgtatggaacggactttgaagtgcggttgcgcaatcaactgtcgcaaaaggccattgccaaagagtgtgccgaatggattcgtaagaaagtcaagttccgctccaattcatcgcaagagcaaatgggcggttttcttcatgtccaaaaggaatcggaatatgtctatctgcctttcaatgagtttacgactacccaactgggatgcgagcgaggtaatgaagtgtacaacatagtcaacgtgcttcctacccccacagccgaagcctatcttgccatcttcaacgaacagtggaacaacgacgaaaagttttcggatgtaaccgaccgcatccttgaatacatcgaaacggtctatcaagagaatgcgccggaatatatctacttcattgctctttatcatatcttcaatgagtttctggaagatatttcggaggatgttctacccaacgaacgtaccggattcaagaacagtatcatttggaacaaactctacaatttccagcgcgatgccgctcttgccatcatcaacaaactggagaaatacaacggttgtatcttggcggacagtgtaggtttgggaaagacattcacggcacttgcagttatcaaatattacgagaaccgcaacaagtccgtgcttgtattgtgccccaagaaattgaatgaaaactggcagactttccgagccaattacaagaacaatccgattgccgccgaccgtctgcgctacgacattctgttccattcggatttgtcgcgcgaccgaggcgtcagcaacggacttgacttggaacacatcaattggggtaactacgatttaattgtcattgacgaaagccacaacttccgcaatggcggcaatgtggatgatagtgaaatcatagacgaggattccgacaagaaagaaaatcgctatcagcgtttgatgaaccgtgtcatccgacaaggagtcaagacaaaggtactgatgctaagcgccacccctgtaaacaaccgcttcaacgacctgaaaaatcagttgcaacttgcttacgaaggtaaggcggagaatatcaatgccgaactggatatcgaccgccacatcgacgatatatttcgcaatgcccagacagtgtataaccgatgggcaaagctggaagtgcagaaacgaactacggaacgattgttgcacgacctcagttttgatttcttccaactattggatgccgttaccattgcccgtagccgtagccacatcatgaagtattacgataccaaggacatcggtgagtttcctacacgattggctccgctctcacgtcgtcccaaactgacggaccttgaccatgccatcaacttccgggacattgccgaacaactgaatgagttgaatttagctatctataccccctcactctatcttttcgatagtgtgaggaacaactatgtcatcgactttgacggcgatggcctttccatcgacggacgagaaaaaggattgagaaaactaatggcaaccaatctgctgaaacgattggaaagtagtgtcaactccttccgtctgacattaactcgcataagtaagtatatccgggaaacgattgtcgctatcgaccaatttgaagaaaagcgaggtaatgccacctttgatgtagcctctttcaccgaggaattggattcgaccgacagcgaaacagatgtattcgccacgcgcaaatcgaaaatcaatctgcgcgacatggactatgtgtcctggcgcaccgatttgaagtcagaccttgaaaagctggaacttcttctgcttttattgaaagatattacaccggaacacgacagtaagttacagcgacttatcgaagatttgaaacagaaattcgcacatcccatcaacggacaaaacaagaaggtactgatctttaccgcttttgccgacacagcggattatctttatacggaattggcgggtcggattaagaaagaatgtggattgcatacagcacttatcaccggtacggcagacggacgctgtacgctccctaagtttccgctctctttcaacaacgtgttgacttggttctcgccattgtccaaagaccgtaccgcccttcatcctcatgccaccgaagagattgacgtgctgatagccaccgactgcatttccgaaggacagaacttgcaggattgcgactatctgattaactacgatattcactggaacccggtgcgcattatccaacgcttcggacgtatcgaccgtatcggctcacgtaacaagcagatacagctggtcaactactggccggatatgaagctggacgaatacatccaactgaaaggacgtgtagagagccgcatgaaggctaccgtacttacggctacgggcgatgataatctgcttagcgtaaacgaaaaaggagatttggaataccgacgcaaccagttgcgacggctgcaagaagctgtggtggacattgaagatatggatacgggtatcaacatcatggacttgggactcaatgaatttcgattggacttgctctcttacatgaaagagcatcccgatatagagcacgctcctatgggcatgagtgccgtggtagagagttccccaatggttcgtccgggtgtcatcttcattctgaagaaccgaagcaatgcggtaaacatcgaccgtaagaacctgttgcatccgttttatatgatctatctttccgaccaaggcgaagtcgtttacgaccatcttcatcccaaacagttgctcgatgtgatgcgctatgcttgcaaaaacaaagcggaacataatcctgcactctgtgccgcgctcaacaaagagactgcggatggacgcaagatggaacggtacagcaatttgcttcaatcagcgattgaaagcatcgtggaggtcaagacagaaagcgacatcgagagccttttctctttgggtgaaacttctgctttgcaaggcgaaataaaggggttggacgattttgagttagtcactttcttaatcatacgaaaccaatgatacagtttccaccttcaactctcgtcaacaagcctgttcccaaaacggctttttatcggcacttggatgtcaatgcaaggctgaaagctcgttttgtggaagatattgatcgcattctatggtggacaaagttagcaccttccacgctccatgtggaggatggaaagacggtgcatgagattacagtctttcacgttacgttgaaatgcgaggatgtgcccgatgatgtattcctaaccatcgacaagcaaatgccgcgccacatactttttgtattgcagtttgaagaatgttaccgcttattgctgaactacaaagagtggatagacgaaagcaaaggtacgtttcgcatcattcggtcgttccgaaccgcttggacgaatagcgaagcactgcaactgacaattgagggcgcaaccttagataaggtatatgaagccttcgccggacagatttcgggatttggcaccaccaatgccaccgacaccaagcgcatcattgagttgcaacagcagttggcacagaaacaacgaacggtagaagccctgcaaaagaaggtcagagctgaaaaacagttcaaccgacaaatgcgtcttaatgaagaagcacgaaacttgaaacgagaattggcgatgttgcaaaaggaaatcaatcaactaacaataaaaaagtaaataacagcaattaaaaagaaactatatatgagcaaagttatattagaccatttgaatttgagttcagccgatggtacgcaactcaacatggaggctctttatcaaatagccccttcggtatttaccgagacacgcgacccgaagactggagaagtaagtcgaaaagtaaatttcgaagcattgcgccaacttttaggggacaatgtgatagagagtgataacgacggtgaatgttatcagtttacttgggtcggtaagaatgcggcaaaatcagaagctgcacgttctactgataagacactgcgtcctgtgccggaagactctgtagattgggagaacaccaagaatctctatatcgaaggagataatttggaagtgctgaaattgctccagcgttcgtatttaggaaaggtgaagatgatttatattgaccctccttataatacgggcaatgattttgtgtacgatgatgactttgctcgcactgctgccgaagaggatttggaggctggtaatgtagatgaattagggtatcgttatcgtaagaatacggattcaaatggtaagttccattcggattggtgctcgatgatttatccacggctacttgttgctcgatcgttgcttacagaagatggagttatctttatttcaattgatgacaacgaagtcagaaacctaaggaatatctgtgatgaagtatttggagaaggaaattttgtagcaacattagtttgggaacgagccttttctcccaaaaatgatgctaaattcatttctaatagtcatgattatattgtgatgtatgccaaaggtataaacaactttactattggaagattaccaagaacagaagaggccaatgctcggtattctaatccagacaacgatccaaggggtgtgtggcaatcagataatctaacggttaagacttattctccatcaggtgactatccgataactcttccatcaggaagagttgtagagcctccagcaggacgctgctggagtctctcagcgaaagctttcgctgagagactccaagacaaccgaatctggttcggttctgatgggaatggaacacctcgaattaaacgtttcttgcacgaattaaaatttgagggaatggccccaacttctattcttttttataaagaagtaggacacagtcaagaaggtgcccaagaagtaataaagctatttagtgataaaggtgtttttgatggtcctaagccagttagacttatgcagcgtttaatcactttagccaatttgcaagatgactctatcgtacttgacttcttttcaggttctgcttctacagctcacgctttaatgaaaacgaatgcagagaaaagtacctgttgcaaattcataatggttcaactaccggaagaagtgagtgaaagtaagaagaatcaagattataacaccattcccgaaatcggtaaagaacgcatccgtcgtgccggaaaaaaaatcaaagaagagtctcctttgactacccaagaccttgatactggtttccgtgtattccgtctggacgaaagcaactacgaggaagtttcaaagtcgcccaaagagtacgaccaagaccaacttgccctctttgctgacaacatcaaggcagaccgcaccgacttagatttgctttttggagctatgcttgcttggggtgttacactcgacctacccatgacctccgaaacagtagatggatgcaccatttacaccgtgaacgatggtgacttggtagcctgcttctccgaaaacattaccgacaatgtagtaacagctatggctggaaagatgccactacgtgtactcttccgtgactcctgcttcacgcaagacgctcaaaagataaacatctacgagcaattcaagcagttaatggattggacggacgatgaagcattcaagaacatcaaagtgatttaaatttgcagtcatggaagaaaacaagatactcatatacaccgatagtaaagggcttaccaagatagacgtaaaactggaagaggacacgttatggctcacacaagcacagatgtgcgagttataccaaacgtctagaacaaatgtcgtcgagcatataaagcatatctatgaagaaggagagttgcttcaggaagcaacctgtcggaaattccgacaggttcgggaagagggggaaagaaaagtggaaagggaaatgactttctacaatctggatatgattatcgcccttggctaccgtgtgcgctccatcattgccacccgttttcgccaatgggcaaccctacggctaaaggaatatatgattaaaggattcaccttggatgatgatcgcttgaaacaactgggaggtggcggctattggaaggaactgttggaacgcatccgggatatacgtgccacagaaaaggtactatatcgtcaagtgctggaaatatatgccacgagtatcgactacgatccacgagcttctgtgtcgcaagagttcttcaagaaagtacaaaacaagatacactatgctatccacggacatacggcggcggaattgattgtcgaacgtgcagatgcggaaaaggattttatgggacttcttaccttcaaaggcaatcagcctacattggtggaagctcgtaccgctaagaattatttggacgcaaaggaacttcgtgccatgggacagttggtttccggatatttggactttgcagaacgacaagccgaacgggaacaaccgatgaccatgaacgactgggcgaactacttggaccgaattcttacgatgtcgggcgaacaactcctgcaaggttccggtagtgtgtcgcatgcggacgctatggaacacgccaccaatgaatatcggaaatacaagcaacgtaccattagcgatgtagaacgggattatctggattctataaaacgtataggaaatatgggtaaggaaggaggacacaatgaagattaaatataagcaccaacgctttcaggcagaagcggccaagtgcgtgacggatgtatttcaaggacagctcaaaagcgatgggttgagcaatttccttgtggaccaaggcaagaacagaggattctatgaagtggaaggctttggcaacgctccattggtattgagccgggaaagcctcggcgaaaatgtacgctccattcagatggcacaaggcttgaaacccatcgaacatttggagggtgaagacctgacctttaccatcgaaatggaaaccggtaccggtaagacatacacctacatcaaaaccatgtacgaactgaaccgacgctacggttggtcgaagttcatcatcgtagtgcccagtattgctattcgtgaaggtgtttataagagtttcgagagtatggcagaacactttgccggtgagtatggcaaacggattcagtacttcatctacaactccaaacaactctccaagattgacggctttgcgcaggacaacggtattcatgtcatgattatcaatacacaagcgttcaacgcttcaatgaacgaagaaaagaacaaagaaggacgtggcggagatgctgcggcacgcatcatcttttcccgacgggacgagttcggttcgcgccgtccgatagacatcttggcaaagaccaatcccatcatgattattgacgagccgcaaagtgtattgggctcggacaaggggaatgccacccgaaaaggtattcaactattcaatcccctcttcaagctattgtatagtgccactcaccgcaaagatgatgtatataatatggtgttccgcttggatgccattgatgcctacaacaagaaactggtgaagaaggtagaggtaaaaggtgtgcaccaggtaggttctacggctacaaacggctatgtctatctggatgaaatcatcattaccaaaggaaatccgcaagcacggattggctttgatatgaaaacgagcagtggcaccaaacaagtgatacgattggtagatgaacgtttcaacctgaaggaacaaagcggcggtttgcaagagtatgatgacaactacatcgtagaacgcattgacggcttgaccggtacggttcatttcctgaatggcttgacactgcatgagggagatatgtcaggagctatcaatgaagatgtagttcgccgccaacaaatccgtgaaaccatcaagacacacttggaacgcgaacgccaactgttcccgaaacatatcaaggtactttccttgttctttatcgaccatgtggacaactatcgtctgtacgacaaagagagcgtgcagaaaggtaaattcgctgaaatgtttgaggaggaataccacaaagtcatacaagagttgatgcccacctttaccgacggagcttatactcgtttcctttccgaccccaagaatgcgtgcgaccgagttcacgacggctacttctcaatagacaagaaaggcgtcagcgtagaatctaaatctaaagaaggagaaaacgaggaacgtggcttcaatttgattatgaaggacaaagagcgtttgttgagccaagattgtccggtacgtttcatcttctctcactcggcactcaaagagggttgggataatccgaatgtgttccaaatctgtacgctgaaagatacggcaaacgaaatcaaaaagcggcaggaagtgggacgcggtatgcgtctctgcgtcaacgacaagggagaacgacaggatgccgatgtgttgggtgatgcagtatttgacaccaacatcctgaccgtcattgccagtgaaagttacgatgactttgcaaagaaattgcagaaagagatagccgaagcttgcgacaatcgtccggtagtggtgactgctaccctatttaccgatgcaatggcacagacagaaacgggtactctcgtaaagatcactacccaacaggcggttgatattcacgaggaactgattgcgcaaggatatgtcaagaaaggcaaactcacccagaagtattttgatgagaaaaaagccggtgcgcttgacttcggagagcagaacagcatgaagtcgtttatcgtcaagcaacttgacaaagtgttcaaccccgatgactataaacctgccaatggtagagagaagaagaaagcgacattcattccaaacaacttctataaaaaggagtggcaagagttgtggaaacgtatcaatacacgtacttactacaacgtaaactttgatacttctaaacttatcaagaatgccattgaggaagtggacaagcacctgaatgtaacagaaatccgcatcgtagtggaaagcggttcgatggaagacatccgcaaccgtgaggaactggaagcaggtgccgccatgtctgctgccaagataaagaccatccgtgtaaccgaggctgtaggtggcaatgtaacctacgatcttgtcggtgaactggtacagataacaggtttgacccgtcgaactattgtcagtatcttgcaagggattgctccggcaaccttccaccaattcaaactcaatcctgaagagtttatcatcaagacaggaagaatcattaacgactgtaaggccatctctttgatacagcacatcaagtacgaaaagcgcgaccacacatttgacagcaacatctttgaagaagtaactttgcgtggcactttagggaaagatgccattgaaagccaaaagtcgctttacgaccttgtggtagtagatagccaaggcattgaaaaatcatttgccgaatctctggagaaggaagatgacgtagtggtttactctaaactaccgggtggcttctacatcaatactcctatgggtaaatacaacccggactgggcagtagccttccgcgaaggtagtgtaaagcacatctattttattgcggaaaccaaaggtaacgacatcgaagtatcgcaactgagaaaagcagaagatgccaagattgagtgtgcccgtcgtcattttgctactatcagtaccggtgaggtggtgtatagtgtggtgaagacgtatcaggatttgtataatgcggtgatgaaatgagcaacttagcaacaacgtaagaatgcaatatctttatcagttaaatgcttaaactaaatgatattcaataatatgggaaatatacagctaaattcaaaacagatagcaatatcgtggacaggacaatttgtttttcggaaagaaaccgataataaaccaggacttcgttctccgcagattggagcactacatgcattaatggctcatgttgagagtaatgaagagcgtgcgatagtagtcatgcctacaggtacaggtaaaactgaaactatgttagcatttctcatagctaatgtatgtcaaaaagtttttgtgattattccttccgatgcgctgagaaatcagacatataaaaaatttaagtcactaggtttactccctaagcttggagtagtacctgctaacataaacttacccattgtcacaaaagttacccataacttgaaagatgatgaatggaaacaaaagatagattcatccaatgtcattgttacaacaatggcattggcagctaatatatcttataaggtacgacaatatattagagaaaatgtatcgtttgcatttatagatgaagctcatcactccaaagctgagacttggaatgaatttattggaatatttcccccttctaaagtcattatgtttacagctacaccattcagaaatgatggtcaaaaattagcaggtaaaattgtattcaatttttcattaaaaaaagcccaggaacaacattactatgaagcaatcaataattatcaaatagttaaatacaacacattagatgcagacaaagcgattgcgaagaaagcgattgaaattcttcaaacagatttggctgaaggatatgaccatatagttatggcaagatgtaaaagtaaatccagagcaaaagaagtttacaagatttatcaacaatatcaagattataatcctattattgtgtatagtggaatgcctaatgcaattggtgtactcaaagcaataaaggagaagaaacacaggataatagtatgtgtaaatatgttgggagaaggttatgacttacctcagctcaaaatagctgccattcatgatgaaaagcaaagtttggcaattacattacagtttattggtcgatttaccagaactaatgatataaagttaggaaaggcaagttttatcacaaacattgctaatcctccaatcaaagaagaaataaatagtctgtatcaaattgatgctgattggaattacattttacctcgtataaatgaaagagcgtcaacacaacagcaatctcttacagattttttagaaggttttcaaggtgatttaaatgatgaaatatcattggaagatattcgtcccgctttaagtgccgaaatttacacaacaaaatcaaccaccacagcattcaataattggaaggagggaataaatcacattaataaatacgactacatattacacactgtttctggaaacacattagttgttgtattaggtaacaaatcgtgtgtattgtggggtgatactaagactgtacaaaacctttcttgggatattattatcgtatattttgatgcgataacaaaaaggatatatctaaattcatctattaaaataaaaggcgagaattttttgaaacacatattttcaagccccattaaggtacaaaatgatagtctgtttagagtttttgctaatgtacaaagacttcgactttttaatgttggagctcgacttccacaaggaaaagatatttcatttcagtcatattatggaagaagcgtacaagatggaatagatttactgtcgcaaggtaaacttttgaaaaataatttatttggtgtagggtataaaagaggaaatccaacaagcataggctgttccagcaatgggaaagtatggtctcgtgaacgatgtgatttacaacattaccaagaatggtgtaatgaaataggtaaaattatattcgatgagagtatagatactaatgttgtattacaaaatatgttatcatttgaaatgctcaaaaagtggcccaacgctcatcctattagtatggactggaatcctgaaatgtatgagcattatacgcagctagttcattttggtgaaagtctattaccttttgatgatattgagataacaatagaagatgatacgtctgtgggtaataatataatctttagcttacgaactaacgattattattgcaaatatcgaatagatatattatcagatgacaaagacaagaatcataaaatacaatattcatggattggaggagataagataaagttcgtacatggaaatacagaagtttccctagaggatttttttgttgactacccacctaccatattttatgcagataatagtatatcatacggtataaagttttgtaagcccaaacgtaaagctgaagaaatcccagatagtatgattagtacattaacatggaatggggtcgatctttcaaaagaatcccaagaatcagctccatatcgcaaagattcgatacaatactatatggtacaaaccattattgacaaacatgattatttgattgatgatgatggatgtggcgaagttgctgatttggttgcaatagataattcagaacatcaaatagatgttaccttatatcatttgaaatatgctaaaggtggaaaagtgactgggcagatagaaaacctttatcaagtttgtggccaggcacaaaaatctattcgttggaaatatataggtggcaataaagtatttcaacatatccttaaaaggaatgaactaaagacttcaaaggggaagagtagtagtatattaaaaggggatatttctgaaattattaaactgcgagaagaagcgtctaataaaaaagaacttcgctaccacatagttatagttcaaccgggtatgagcaaatctaactcttccagtgaaatgaaaatattattgggtaacacagtacaggttcttcatgaaatggcaaatattgattgtcgagttatctgtagcgaataagaaaggtatattatggatgcaaagcaatacatgataatagatttagaaaaacgtggtgataagcgaatgtttattaccgaacaagtttcttctatatacaagaataagaacggtctttggacagtacagttcttgtcttctccccgtgtattcaattataatcaatcccggttgctctatctcactcatcctgaattcattgaccttaacgaaaaaggattgtacatccaaaacaagcatatcactgatgttgcagaattacttcgctttacagatgggcgacataccttctaccatataacttatgctaatggttattatgagaatctggaaggaaatgaagtttatattacacgcacacccattgataaaaatgaaggctctacttgggattacctgcgcaagctggctgccgaaacaggactgatgacagaagaggaagaaagcattctctccaaacaatatgaactaatagatacgaaacgtgataatgttcctttggcgcaataccttggtgataaaacaaaattagccacccatcatactcccaagcaaatatactatccgtttggatgtaatgcgagccaaaaagcggcagtagaaaaagccttaacgcatcaagtcagcatcattcaaggtcctcccggaacgggcaagacacagaccattttaaacattattgccaatctgctaatggtaggcaagactgtacttgtagtttctaacaataattccgcagtagaaaatgtggcggaaaaattgggaaaagaaaacttaggatttcttgttgcaaaactgggtagtgcccagaacaaagagactttcatagccaatcagcctgactatcctaattgcagcgattggataatagacgaagaaccaataaagcaacagaccattcacgcgatccacactgtcacgcaaggttttgacggacaaataaagcaagccttactgaaagccgaatacgatgccctgcagaaagagacgaaatacaatgatatgcttcaacaggaaattagtttaattgagtggttaaaacataatcattcaaccaaactgatgagactactcaatctatatttaaggatagtcgaaaaagaacggagccccggtttatggttccgtctgaaacattcattttcaatgggaatgaaaatgttttcatttctgaataactgccccacaaaagtcatcgcaagtttagaatctgcatactatctttctcgcaagaccgaaattgagcaagaaacagaagctatatcttcagtactccagtccattgaccttcaccagagtgtaaaagaattacgttcttcttcacttcagttattaaaaaacaatatagccaaacgatatacttcatcggaaagaagaaagtttacgcttaaagaaataaagtcaaaaacagaaatgtttttgaaggaatatccagtagtacttagtacaacctattcagctaaaagttgcatcagcaaagagatggtttttgattatgtcattatggatgaagcctcacaagtggacataaagacaggcgcattagccctttcgtgtggcatgaacatcgttattgtaggagatgacaaacaactgcccaatgttataggccgcgaagaagcacaagcactcaatgccattcaaacaacatatcacattgacgattcctacaatgccgctactcatagtttcctccaatcgtgcgtagaggtattcaaagatgctcctgttacacttttgcgtgaacattatcgctgccatccccaaattatagaatattgtaaccagcgtttctataatggagaattgattaccatgacaacggataatgcagaaaacgacgtattaaaggttgtacgcacagttaaaggcaaccatgcccgtggtcatttcaatcaacgtgaaattgacgtgattgtccaagaagtgataccggaatatgtcggcaagggaagcgtgggtattatttcgccttaccgattgcaagcagaagaaatcaacaaggctttgggacaagatattgccagcactgtacacaaatatcaaggtcgtgaatgtgataccatcatcctgagtacggtagataacctcccaactgaattttccgatgatgccaatctgctcaatgtagctatttcgcgtgctaaaacccatttgtgcatcgtaaccaacggcaatgaaatgccacaggagtcgaacctggcgcagctcatcacctacatacaatataacaactttgagataaaggagagcaaactccgttccgtattcgacttgctgtacaagcaatacacctcagagcggctggcttacgagaaagcacacccatcagtgtcaacacaattgtccgagaatctaatatatgacattttggtcaaagttatctcaaaacaagtatgggaaaatatagaggtcgtatgccattatccgttatcaaagctaattatcgactggaatctattggacgatacggaaaaggcatttgccgaaagcccttttgcacacattgactttttgctatacaattccctcaccaagcaaccgcttcaagccatcgaagtagatggctggcgttttcatcagggaagcgaaacccaacaatctcgtgatacgctcaaagatcggatattaacgaaattcgggttatgcccaaagcgtatttctaccactgcgatagtgaatgaggaaacactcacgcgtctgattcaaatataggcaactccgatccgcattcacagtagaagtcggagttggaacatatcatagaatttcacgcagtatattggcaaccaagatacagtgtcattgacatcaatcaaacggaaaattcagattatggaagttgcatttgtattgtcgtacacactttctgcaaatgaaaacataatcatttcaatgaactaaatgtccacaatattgttccataaaaattgccaaatagaagcaatcttgataaaccgagaagactattcattttttctttggcaatttgattttgcgattatcagtttcccatttatcaacatatgtattgagagcttccgctattatatccttcaaaagcaaaccttcaacaagggaaatatacttcactttacgaagtaaatccgcatccacaataaaggtagcccgagcttcctgaggcttcttcgcattttgggcggcttcacccttcttaggacgacccacattttctttgcgcctggcttccagtctggatttcatctgttcggtagtctctgtttccactgataaagtttcctttacatggttcacttcgttgttctgaggtttagcatcctgactttcttcctgagcgacagatttcccttgtatagactgttgttgagtggctgatgatatttgggtttcgcctatgaaaccatccatcaataaggttaaatttttctttgccatacatttattggtttatttgttgagtttctaatttactgattatattacttgctgatttggttactatattacgaataacctttgcaataagtcatatagtaacatagtttacctattttcttcccgacgaattatttcctctgtgagcgtcctatagtcggcagcaccattgcttttcgggtcatattcaaagagggtctgaccagatagcggcatttcagcaatggcaatgttctcacgaattttcgtctgaaagaccttgtctccatagcggttcttcaccatattcataacctccttattgagtttgcggttgttgaaccgagtgaaaaacacaccacccaattccagcttgggatttacccttcgcttaacttcgcagacaatatcgcccagcatggtcagtcctttcaaaggaagagcttcagcggtcaatggtatatacaacttatccgctgccaccagcgcattggttgttacgataccgagagaaggagagcagtccataaggatgtagtcgtacttctccttttgtctgtccaaatgggatttgaggatgccctcccttgccatcatggtagccatgtctatctcggctcttgccaaatccagcgaagccggaaccaaatccagatttctccggatgggaacaatgggaaacggcttgtcctttaccaacgcatcatagatgcttgtctccgggtcttcattctgcgtcagcgtgaatgttaggttctgctgcgcatcaaggtcaaccaacaatacgcgttttccttgcagggcaagtgccgctccgatacaggcagtagaggacgtttttcctactccacctttctgattgccgatagcgattgttatacattttcttttcatataaaatagagttattagtttactatttgaaatgtttacttgcagacaaatatacacctttacttgttgaataagtgatttatttacctatttattcccaaacaaacatgattttatctcattgttaatcaatcattaaacaaacatcaaacaactattaaacaaatatcaagacaaatcttctgcctttgcgagtttcattggacattctcatattcagcacctctttttacttgacatccaaagcatgataaatctgtctcaaaatttcatatctaaacaagttgttttataaactccgacccacgcctcacggcggaagtcggagtaggaacatatatagaagtttacgctgtctgtttcgctgccaagatgcggtgggcattggcattgaccaaacggataatccgttcatggtgttctgtattcttattgcataccccacggctttgtatcaccttgccctccgtcagtgaaaactcaattgtttcgatgcggttgccctccttgtcgtgagcggacaatatcaggctttcctctttggcatagtattcgcattggaatacgcagtggtgcatggcatttccctcggcttggaaagcttccaacgtatcaagcaccaagatttcaaggtcgttgtcggtaatggtaataccgaagtaacaggacttctccttgtagaacttcgcttcctgccgtttggctcgttgcatctgttctttatttctccgcttctcgtcctctcgcattttcttgtacagccaataatcgtgctcagctttgagattttgcgggcagatgtatttagtgttatgtatgtcctttccgcattgctccaacaaacgaatagtatcacaccatatcccatagtcagacggatgatagtggtttcgggcggctatcttgtaagagtgccaacatctgtccaaatccgacaagtgatgcacaaagtaccccacggcttgcaagtctcttgatttcatcatggtttctatccggctgtccgccagcagtgcattcatcagccttgtcggatgacaatcggacagtttgcctttcatgccgttacgtttcagtttgggaagaacacgataacgaggataggcataagtatcggaaatgacccaatacacatcatatagccgtttcaagtctatttgtgaactccaattaaaactatccatataatgccccaatgttcttgcccttgccgttacagccaacttgccctcggaattaagccacatacggcacacctcccaataattcattttcatagcttccccctttctataagcgactttcaaaagaaagacacgttgcacctgcaatccgtccaccacttcaagggaagaaaaataggttgtttccgtcatcttgcgttgcaaggtgtcatttacttgcaagcggcttccgcaatgaggacaacggacagacttgccttttcccttatagtcaaacttcattccacaatcgccacaggtacatttatgtcccgatgtgcggaacgctatatgtggcactaccttctttactgcccatactattactttggagctaatggcggtcaacctctcgttggaggttgacaccgctttttcaaacttcgttctcggtttcatggcttagaaatcaaaaagtgataattcgggttgtttgttctctttcggtttgaccgctttcggcttggagttccgtgcctgcaatttgcgcagttcctcgtcctgatagcgtttgagggcaatgtttttctgctccgccttttcctcgtctgtcaactctatgtggtggttgaccacaaccgaaccattcaacggcttgccaatttccaaggttggctcgtctatgacgtgaaccgccatggaaaagatttcctcgtcggcaaagccacaacaaccggatttctgtacctcgttgaagatgtatgttgctacatcgtcaatggtgcgagtggtggtttcgtacttggcacggaagagttcatcctccgctgcccggttatcaagatagttcttgatagtttgcttgaattgttctgttcctttcatatgttcctctctttaagcgtaaatagaataaaatgtaataattgtcagtcagggtcaaactcgtacacctcggtattgtcgtacccatcgaacacaacccgaaaattctcgaagtcctgccggtttgccaatctgacggtatcatacgcaccgatgtaataaggtgccattgtacgagacacacctcgcaatacgctgtctgccaatgtatatacggtatctggttgctcgggcatgatataccccagtgcgtactcattaaagactacaaacttaattttgctcatatcgctgtaattttgaattgtttttattttcccttttgtttgaagccttgcggcttctcgcttccaggagatttttacgatacctttccacggagggcatgagggacaggaggcaaacgtggcaagcggaaagcggttggaatacccaatttggtacaaattgcggaaggttgccggacgctttccgtgcagacaagcagagtggcgtttgccgttgtaccaccctccgtacctttgtatcggaaaatccgccgggaacgtgatgatgcccggatagacagaaaatcccaatgcttgtgcacaggaatttcaaaaagaaacagtagtaatgaaaaaatcccggcaactggacgaaacacagctgtcgggacggtaagaatagatttggaacaaacctatcaagcaatgctatatcagcggaatctcaaaagacttcaccacacaacgggcatccttgtccaggatgaaccagtattcagaacggtaaggcttgccaccggtcgtttcagcctcgaactcaatcttgaccttccaaccgttgaagggcttcttagccttgtcatcaggcatactgaatgttacaagggaacggagaaccgacatggtagtcatctgacgctccatcagttccaccatatccttttcttccgggtcgaagtcctccagtccgttcgtctccttcatgaccttctcgttgattttcatcatcagcacggagagcgacatcttctcatccatgctcacatattccctgccgaataccgaatctggttggctgatacccttcaccctgaccgatttcgcattgtccaccgaagccttcagtgccagttccgccaccttgacggcacgcttctccggctggtcggaacaacttacgaaataaaatacaccgctccaaaacaagacaatggagacaagtattacaattatcttcattcccggtctcatatcttcacgatttgaagtttgtcgggagagacaccgagccgcttgcggtagatcgagccgtcatcacggtacatttccaactcaccggaagtgatatgcttctcgcaaagttccttggcttccgccagtgtcagctggtgcccgccgatgttgcgccagatggcaaaggaacaaggcgcagcctgattgctgtagttggagcagttgaacgcccggcttcccacacggatgtccccaccgcaatgcggacacttgccgatgaccggctgcatcaggatattgccgtcatccgccagttccaatactgtaggaaaagtcttgccctctttggtggcaaaaccgtccaaaaggatgcaacgcttttccaacaactcggcaatctcctcgtcattcatcttgcggttgccgataatgccgttgatgttcaacacgcaggaaggctgttcacccaagttgtgctcgcagcgatatcccttgcaggttttcaccacgttaccgccacaaaaggggcagcgacctatgattttcttttctgtttccatattactttattactatgtgattatacaattatgtgattggatgagaatgttacaagtagaaaagtttaccatttcagcaagtagccctgtttccattccgccacgattcccccgatgatgttcttgccggacatcacgtttgcccatccctcggggtcaagggaaaaccagaggtcgttccaggacaacgtgcgtacttgccatgccagcaggaagaggtcggtgttgatggtctccaaacgggttaccacctcattggcgatgtagtaacgctccgaagagttcaacaggttcaccttgtgcttctcgtcctttccgtcagcaccggctacgtcatagctgcccgaagttaccagctgcttcatgaacggatagagagccgccatctgcgtggcggcatccgtcagctcgtccgaaacgatggcggcaatggcagtacctttgaggttgccgtcgatggatttccggagcaggttgcagttctgagggatttccttcgctaccagttcccctgcacgtttgatttgatacaggttctgcatcgcgccttgggcattggaaaggtactccagcatcttgttctccacactgtgtacacggtcaagagccacagttacagccgcttctgcggcaatgatctgctcctgtgtcttcttgcgcttcttgtggatgcttttcagctctgcggtctgggcaaggacagccgccgtcaaggtcgggtctgtctgttgggcaaggactgggttgccggacaacaagcatccgattaaacccagtaccacccatttcctttgaattgttcttgatttcatcattccttaaattttgagacctgcgtttctgcgcccggtcagattctgttcacggtcttgcttgctgggagaaactatcggttccatcggcttgttcatcaggcagtcgttccagtccttgaatgctttgggaggcagccattgtcccatccggtagcgtatgcctaagtgctcgctgagctgtgctggcaaagaacgttccgggttcaagtcaaaggacttgcccttggcttccacccgaagagcgttctccgttttgcttatcttcatcggaattccttccagtaaagccatcatgcgcaatccatagatgcgccctgccaggtcgttgtcaaagcagtcgaaagcacgggcgttcgggaaacgtgccatgacaccggttatctgcctgtccgagaacgtgcctccaagggaaaccaatgcggcatcccggttcagccggagtttgttcatctggtagaaagccatcgcgtcaagagccgactcgcagaagaacacatttctgaccacctcacgattgccacccgacaggtcagccacccatgccgaagcggaagagtccgtgcccgccgccttggacttgtaactgccgtgtccccgtatctcgtagcctttcaccttgtcgccatgctcgtccgtatagggaaagccgatgttgtagccgtcaaacttcccgtttctccggtcgcgtatcaagacaaggaaggaagccagttccctgaccgtctcatccgagatgccgcgcagggagaagagtcccggcatcttgtccttcactatcggtttgacctcgtacctcgactcgtcaaagacggcgtccagcttgacggacttcatgtattcaaggtcttcccggtattcaggctcgggcatattggcaaagcgcgccatgaccttggcgatcttctgccaatcgtccttgcccgataccagaaaagaatcgaggttttcccggattaacgtaaccacatcgcccttggaaccgtccctgcggaaaaaggtctgtgccgccttgtcatgtggatggctgacgacaatcgtatcacgcctgttgccgtcctcgccaagcaccagctcgatatagcgtcctacaccggctttccggtccagccggtagcccaatgcgtatgcgacatcatccactcccacacgcgatttcagttccttgaagtttaccttgtaatccgtcataagcaatccgatttgttataatcccaatcctacacttgtcttttgcgtccgccgcataactgccagctctggctcgtaggtcttatgcgccgtcatggtcaggaaagctgtcttgtccttcaggtccgtaagctggaagtaagtcttggcggtatctttcgacaccttcttcaatcccagttccaccccgtcataagaggcgcggatggcatagtcgccggagcgggtcttcacgatggcggcattcttgaacgggacttcctctccggcgtccagcggagtgaaagggtcgttcttggcaaggtacggctgttcgccaagagccaaacgctgcctgtccacatggtcgagaatcaggtccgaagccttgttcacgtccgccatgacggagacaatgaatttcggttccttccggagtgctccaatccaggagtccaaataagcggctgagttgtccgttaccttggagtcaaagcccatcgagtggctgatcatggcggccgtgagttcggctaccagttcctccttcgcgtatttcgggtctccgaagcgaccgcccatctcacggttcagctgttccggggtcatggtcgagtgtgtcatctcgtgcagcaaggtggaataatactccatgccgccacgaaaggtttcctccggcgtgttcccgatgttgaactgcgccttcatgggaacaacaatccggtcctttaagggagaatagaaagctccgtcctcacgcttgtccgcctgtatcggacagagccatccctgcacttgtaccatgcggtcgatggcggcatgggcatacattccttcggtatcgcgaagctccggcaccttgaacttctccaccaacttctgcatccgctcgggctgcacttccgccagattggtctgcgccacgttatagaccgggaacgacttgacaaacggaatgacctccaagtccttcttctcctccttgctcatggcacggtactcgtccgaactaatcttctgcccgtatttgtccttgactatcatgtcccaataagccaccggaaaggctttctcgcctttgaggacatgcgctttcagattgtgtgcctgcttgaaggtcaggtaaacgggaaggtcgtaacccttgtcaaaggtatgtagttggaggaagaaagagttggaaccggaataattgcgtccgccgacattctgcggcagtcccgcaaagcccgacgcgccgccaatccagcccttcttccagtcggaagccttcatccgctccatgcgctcaatcatcatttcggcgaacttgtccaaagccgcctgtcctgcattgccggaattagttccaaatgccataatcctcgtcatccattacctgacggtccatctgctcgatgtccgtctgttcgatataaaactctgcggactcgtctgacggatctgtaccgtgcgaccggcaccagtccagataatcctgcgcattctcgccctccgtcacaaagcggaggtagcctatttttccttcctgaaggagttccaccaactcctcatgattcattgttgctgacatatcagttgttgtttttttattattagttatgagattgacactttacattttcatggaagcggtcttgtccagcttggcggtctgagcagaaagcaagcccgtgatttccgtgttcaggtacttggcggctatctgttcccgggtagccgtcttggtcttgaaaagggaatagccgtcatcaaaggagatttcatgccgggaggtctttcccttgtcgcccatatccaccgataccttccacttgttgtcggaacggtctttcgccacgcggacatccttggaatcgacaccttccggcagttggtatttctcgtaggcggatttcaggtgcagccgttcaccgaagttcctttccaccagtttctccggtgtcatgacccggtcgaagtaagcgttcaagccctgacgggaagccacggcggacatcttggtgtcgccgacctgagcgtaaaacttgtacttcccgtaatcgggtcgctgttcatccttctccttgtacacgttgaacttctccacggtgatgcgtccttccggtccggctatggactggggcatccggaacgattcttccggcaccttgggcaggagtttggtaggataatagcgttccatcaattgtggtactgtcatttccttcttctggaaggcggcaaggtcggctgcatccatccgctggggcttcaactgcttgccgtctatcttggcggtgaagtaccactcttccgagtttgccttgctctggtacgcatgaccgtgagttactttttcgccgtttgccgtcaccatctgcggctctctcggcatccgtccctgcttggactcggctttctgttcacttttgtcctccgtctttactttggctttcttctccttggcaggtttctccccggcagcgttcttcactgtcttggaaggctcttcctgcaagccctgttcctttttctttttggtcatatctgtatgatttgaaatgagggattcgttagctttcgccttgcgttccgtttcctgtccggctttctgttgccttggagtttccagcgcatcacagatggcgacccttgctccggtacggatcagtttgggcaggttgcggtcaagttcggtgaaaggaaagtaggtcattttcaaggatgccttttctcccggaataatccggttggtgatttccgttgcaagtatggcggcagccttgaccgcatcctccccgtaaatctcataaaagtcattgcgcctgaaaagaagcaacgcatcgggatgtttctttttcaggtcatcgaactgtttgagaaaagcgtccggcttttctgtatttttctgtcggttcataggaaaagggattagagggtaagacctttggattccttccgggagggagccagccggatggcacgctcatgggattgccagtccacgacctgctggtattcccaacggttcttgtcggtcattacaagaccgaggtattcgggatgttggtcatcatagcgcagtttttgctgtctttcccattccttcaggtcgccctgtatcaccttgaacccttgcggttctttgaggtcaacccctacggcaaccttctcgccgcctacgttcagttcaacgggctttccctctcgtacctgctgcttctgctgtgtgcccagctcgatgtcgttgactttttccatgtctttcagtttctgctccagccggacatccgtcaccttgcgatggatgaccgatttcgtttctgggtcgagttgcaggtactgctgtgtcttctcaccattgacctccacggctttttgaagtatttcgcctttgcctaaccgttccgcttcctgttccgtcaggcgaagcaccttgttccgttccgtttcaagtaccgcccggaccggataagctataagggcgggattgccgtccttgtcggctgtcatctgcaatttgagcggcaacgtgattaagttaccgtttcgggcacttatcgacacctgcataagcggtgttacctcaccggaaaccagcttttccttgacctcttggggcaggctgtccgccttttcccggtcgatgcccaacagtgccagcttctcgtaaggaagcagctcggactgatttttgttgtgtaattccatattccattgttttactgttaattttgcggtcgcgaccgtttgattgtcgcaaatttattggcagtaatcctttgaaatagaaatgcgcaacactattctgacagtaatcatcacgatgcttctgcctgttacggcatccgcccagttctatacgataaccagggagacggaaatcaatccggcttcggtaaagaaaacggctgttgatgcggtatataagcaggaaagagcaatcggaacaacgaaaacggcaggaaatgataccgttctcattgctccggcacttccaaacgacaggcgtctatccgaccggaaaggtaacaaaaggatgtccccaataacaacagggaaaaagttaaatgacagtcttcccgaactgaccatccccaacctttacaaggaaatcaagcgcaatggcatcctttatccgaaaatcgtgctggctcaggctattttggaaacgggatggttccgttctccgttatgccgccacaggcataatctcttcgggctgacgaatccccaaacgaagacctattatgagttcgaccattggacggagtcagtcaaggcttattatacgaaggtacagtataagtacaagggagggaattatttgttgtggctcagagatatagggtatgcggaagactacaactacattcggaagctaattggagtcttacgtatactacaaggaattcattagtaaaccgcatacaaattactaagattaactctataatgcaactagtattcatagatatgacattctattaaatgtaacaccttaacaaacagttatttaagttgctataagactaatttaatctatttaaaattatatatatcaataatttttctgttattttttctcaaaatgttttgattacataaataaataccaatatctttgtgccattaaataaaaaaaagaatatgagaatacaaataagtaaaggtgtagccgtattaatagtaacgaatattatatctggcttagcagctgtcagccttttcaaagataaacgtaaactagagaaggcggtcgataaatcaaataaagataattcgtacctgattgtcgaaaatgaggacttgatgtctgagttagctagagaacattgtaagcgtaaacaataaaacatatggaaacaaaaactcctcaaagtgcatttgaagaagaactactccttcttcgtgcagagcgtaaagctaagcgtgcacatattgaattaaaagcaaatctgaatgttcaaagatatgaagatgattataatcggattcacaatcttgacaatcaagattacgctatatgttcaatagctggcacattaggtggtattattgacacttttatgatcgggattcctcacccgacaaaatctggtgtaaaaggcggatatttagatggcaaaatccgagcttggtttgacaaaaaatacccacccgaagttatggaaagattatcacggacaaaaggagccaaagttccttttgacgcacaggataatcgtaatcttcacgatgctccaaatgttgaagtagatggtttatctacttattaccatcgattattgagccttggtcatgaccctttattaggtttcattgtcggagtatatgatattctgaatggaaagatgaccaccattagtaaaacaggaattctaacttcgcaagaaatgaaaatttatgcagaaagaaaatcatatcaaattcttgatgctataaaaaaagtgtgggtacacctaacaacagatgttaatacctctatggggctacctgtgccgttaatgtctttcttcaacactctacagtttggagaaattggtaaagaaaagttatcaattgcggaagttgtacaaggtatgtactatcaaggttatgatttccaacatttctgtgccatgtcaatacctaccatgtttatagaaattttagttagggcagcatggtggataaaaagcacaattaatggcaatccgatattgaaatctacacctttatttattgggagaaaaagaaatcctaaactagataccatgttgtgtttatcccatggcattttttgcgcaatgaatgctgtaaaagttggtgtgacagaaaatccatgtgcaataaactatcctgagtggtgccgtttttctgaattactaatcaaagaagcaaaatatcaatttatagataaatcttcagaacgtttgatttatgtcagcgatagaattatctcagattacgaacaggctaaaaaacgttacattaatgattgaacagataataaaaaaacgtatgaaccttttgggattaacccaaaaggaacttgctgataaggcaggattaacaactgctcaaatcagtttattcttcaatggctcaagtactttgaatcaaaaatcactagaaagtctacttagtattcttgatcttaatatcgaaatgtacgaaaagcgatttgagttagcaaaaaaggttgcagcaacatttatagaaaaagaattaaagagcgaagatgtatgtgttatgtcaaaatcgctaatggcaaaggaatctggagaaagtgcaatcatgcttttctacgatattgaagaaaaatatgtaaatgagatagtaaaaacgagaattgttgattatgaatctacttttgctttctttaaagcaatggtgattcagatgatgacaagcaatttaaaatttactggttctgcctattcgacctcatggaataaactgacatcaaagaaacaaccttttgcagcatctatagcaactgctgcagctgtaatgggaccgattcttcccttaggacttttaggattatcagttttaggtatgagtttgtttgcaaaaacctccctaataacaccttttgagatattagcaaaatctatgttgaaaagaagtaacaagtgatatttacttatacaataatgcaaaaatgcgatagctttacaccatctttttagttatggcaaatattataaataagtgcaaaggataaaacacataaaatccatatttagcgactgagccatttataaatccccttaccccattatacaagaataatataaagcatactaataatgctccccatgcgccatagtacgtcatcaatggaaaggcgcagagtaactgcatcattttactgaagggaaaagaaattttatcagatactccaaacaaatagaaaacaacaataacaagaatccctcgccactcataatcaacttctgaccaagtggcaatgaaggctataagaaggatgacacaacaacacaatgtgccatcctttttcaatttctcaaaggcagccaaagccactacacccaaagctaatgtgaacatcacgttatgcgttccatccgcaccattcaacagataccacggaacttcacttattaccgcaaagaatagaagttgtaaaaaatatctcatccggtttcgagtatatctaaacccttccgctaccaagaacgcaaataccggaaaagcgatgcgcccaaagcagcgcatgccctcgtaaaggagcgtgtcgtgctccatcaagtagtaggcacaatggtcaacgaccatcgaaatgatggcgatgaccttcaatgcactaccactcaaatggggtaaattgatagcctttctatatcctgaatgtatggatgccattaacaataaggtttaactcatacccaacagttccttgatcatatcctcaatctcctgattgacccgtttgaagttacggttcagcatgatttccttctcccggtcattcttgaactcatagattttgggaagcggcacatagtgttcttcctcttcctttatcttcttcatgtcaaagtgcgtcttgcagaaatactttgtagtcttgaactcctccgactgctcgatgtcaaaacggttcagcatcctgtcatcggtagccgtaaagtcacgagccgcctgaccagccagccaaccggtcgccatatccgcaatcttcgccgccggaacaaggtagtccatcttttcggagatagtggtcgaaaccttctggtcgttgatggagatagaccgggaagtctgcttcgccttgccaaacacatcattctgtgcccactccaatgtctccttgttacgagccgcacccatgaagatgttgccgcaggtcgtgataatcttctgcatacccaccttgccatagtccgcctccaactggggaagctcctgaaaaccgagcgttaccgccaccttgttggagcgagccgtaccaatcaagcggtctatcttgtggaagtacaaagtcggcagctcatccacgatgatgcttaccggaatgttacccttggagttgacacgggtaatcagacggttcagcaccaaagcgttcaacgagccgatagcctgttccttttccgggtcattggcaatcaccaagtaactcggattttccctatcggaaatcttcaaatcgaaatcatcccccgtaaacacccaataagcttcaggagataccaaccgtgccgcattgacacgcagtgtacccaccataccttccaactggtcattcgccttgttctcgtaggcactcttgaagggagccatcagggaagcaatcttgtcatcctgcatcaggatattgaacacctggtcataaggtcttcccaagaaagagagcacgtgcggcatatctgaatactcgccggtaacggtgtccggttccacctcgtttccatcctcgtcctcataccaacaacggtcaatgactatccgtttccctgtccggtctttgtaggaaaagccgttcagctccacaaacatcctgtcctcatcggtagaaacatcattcccattttcatccacgaagtccaggactacattcccttcctcgttaatggcattgaagtcatcccagttccttatcaccagttccaacttctttccctcctgtgaaacgaaccgtttcagtttcttgccgtttctgaacccgaccggatggaagttcacgaagaaatagatgatagccgccagaaaattctccgcagagttggtgaagaacgcttccgagccgcctttcttctcaccgccgcccttgttcagggaggcaaggagtgtagcagccgtttcggaggcagccgccaagtcgggaatgtacttccgttgaattggattgatgcggttggaatactccacatcggtaaagttcacgatacggaacccgcaattttcaggcagtttgttcgatttccgattcttgcaatactggtagaacaaggtctttgccaatgtcggaaacttaaagtcatataccatcagggcaaaccctttggcggaatgctgacgtataaacgggtcgatgatgccgaaagacttacccgaacccggcgtacccaatacaatcgtgccacggaacggattgatgatattgatccatcccttgtgcatcttctgcttccagtagtatatcatcggtatgttcaccgaatagtcattgttcaccaaagtctccgactgttggaacgattcgttctcgaagttgaagcggtcatcgcccaccttgtagttgtaatacttggcaataccatccagtccctgatgcaccagcatcgtgcccacgacagaacataccgcatagagaatgcggttggcaggaaagcccatccaactgactccgatgttcatcccatggaagacaaagcaaagcccgaccagtgtcaagcctgccagtaccggatagatgaccatcgtcttcacgttgaacttcaaagccttcttcgcttttgtaccgatgcagaccacacagatacagaccagttccgttaccttgcagcccgctaccgaattgaaaaccttaaatcgccccagcaagtcaaggataaactgcgtgatgcggttgtccgccgttatcggcaggttcatgacaatctcaataatgagaaagatatagatgcagcttcggaagtaattgtacatctgctgctgttccttggtctcttcaaatgccatatccgtatgcttttaggaaagattaaaacggtatcttcactccgaacaacaagccgttgcggaacgtatcaccatgaatgaagttcacgttgttcttttggataatggcaaactcgcaaccgttgcggaatacataaacgtattcaaagccgccttccagtccgaggaagaatttcttttccaccgccccgaactgcggaccgaagcggaaacggagcatcccgttcttgtaacgagccagacggtgcttgtaaacaatgccgccgtcccaatagtaacccttccagaaatcaggcttccgccagtggttgcccacctcgccaaagagttcaaccgcatgaccgtatgacaagggacgttcatagccgacggtggcattcaacgtggaggggaacaggaaacctgcgttgacagtcagtttgctgtcctgtgcgaacgctccagccgaagcgaccgtacacaagagaatcaatatgaacttcttcatggctttacagtataagagatatgataatagggatagtaggcggcatccttcaagatgtcggagtcaaatccatccgcatgaagaatgtcctcatattcgatggtcaggacaatcacccgtccgctgatttggttctccgagatttccaaacgcagcaccttctcgtccgggaaagttagcttgggcagcaccagcacgttacgatagttcttcttgaacttcctggatgaattgagcgtaaagactggagacagctcaatcgtctgcgaattggtcgctttcgtctctttcttgtccgtcagcttcacccggatttcctcgatgtcataagatatcttcgtcttgttctgcaacgaatagtcaatgaagaaataatccccgacggcatagatgttgttgaccaccgccttcatgccgtgcgccttcgttactatctggttatatttccggtcgctgctatagaccgcccacgcataccgtgccatttccgccatcggcatggaaacctccggattgatgtaggaccgcgtatggttgtacggcacttcaaagatggatgccgccatgccgggagactgcgtatagagaatgtcatactgggcgatatgacgctctccaatcaatgtgattgtgcccaacaactcattgtccttgtaactgccaaccgcctgcaaagaatcactttcaagatacggcttgatatggacaatgttatcagtacactggttgcctacaatcttggcggtagaaatgtccaccagcttgatattttccggcatgacgatgtgggtcgttacctcgctgttcacatagattttctcgttggcggagacctgcgcaccaacaccgagaataccgaaaaggagtataaataatttcgctttcatattgggtaatatttatgatttgatgatttgtttactttatgacaagtaacctatatgactatcttacttgtcatcttgcttactctgtgattagtaataaagtttacctatttctatcttagcgtgcatcatccgagtttatcagatagacaatcgtattgtacttgattttcgccttgttcttgcggatgccggacgatatagccgaggtagcggagttgtacatgttctgcaaggcttgcagggcgatagcctctcctgaaatccccgatccatagccgtcttccgactcgaagctgatattctgctgcaccgtgttggctccggcatccttcacgaagtcacggaacgaggattccggcacatagaagccctccatgccgtcattgtcgaagacggacagcttgaccttgatgaacttgtcgcccaccaggatgctggtgatattggcacggacacgctgctgcccgaagccggttacagttccatagaggtatgttccctttttaagcctggtatcatccaccgtgacgtcatccaacaatttgaagcgaaggcgcgtaccttcctttgctttggttgtctggtcaatcatggcacgaatcagcttggcttccaccgcatcgtccgaagccgcgaccgtatggaacttgcctgcgttcgtatcggatgacttgatgaccagattgggacggtttcgttccgcctcttctctccgggcttgggcgatggagtccgcccactgccttttggctgcctcttccgcttcggtatttccgtagcccagtccgctctcgatggctttctgcctttcatagctgcgacgctgtatctcttcgaggtcacgagcgaactcctccgtagtgtttcctgaagtgttcccatacacctgtgaattgatgtgccttctggactcagccagagaatgctccagttcttccagttcctgctgctgacggatccgttccgcttcggcggcatccagactgttcagttcctcctcgctgtagccatgctccagcttttcctcgtccttgtcctcttcaccgatgccgccgacggcagtaaaggcatcctcgtccccgaaccgccgtgccatctcatacatcttgtctccggcttcctcggcattggcttcgggaagttccatgttgatgcggtcggtagccaccacgttctccgtcgttccgctgcccccgaaagtctgcatcacaaagtatatcagggcgcacaacgggacaaagatgaccatcggaaagatatacttgggctgtttgaaattgattttaatcatgggttatcattgtttttaagggatttgacaatatgctccagttgcccgtagctttggataatgcgcatcgagtccgcatgggacttatgagaaatggcaatcatggaatccagtccttcccggacagcctgcccttgggaagtcagttccaacagtttctgccgatgcacgtttttgttggcttgaatggcatgaaagcctgtgaagagcggttccatgctggcaatggcattcatgtcggctgtttgagtattgtctgtccgcacacgttccaaagcgacagtgccgaccaacagcaacaacagcgagcccgtcacgcaggcaaaggttcgcttgggatgtcttttcgcccatagattcgcccacctaactcttgcggtcaggcgataccttgcaccaaccgcacctaatttcggctgtagccaagaccggatcagctgatgcgtctgtaaacggtgtttcctgattgatttcatttcgtttttgtttgagttttacattagtaagccaaatccttgttctccaaggttctccagttcgttatcatcagcccgtggggattgttccgtgtcctcggcacggattcgatgtacccggtcgttaccatcgagcgtttcaagtcccgtgtgcggcgcttgataagctgtgttccgtagtaggtaaacttccgctcgtactcgtcaaactgaatggagtcgcacatgatggtgcagacagccgatgaagagataatgtccgagtaaaagccgttctcgtccatcgcctgtttctgtttcaacgccgttccgtccgccatgtacattgctttgccgaccgtccacttgatatagtcgttgtctggcggcaggttgaaaaaatactggtggaaaagctggatgtgcgccttcgcctccatggtgaagttggcttccagctgtgcgcgttccgcaaggaacgggatatcaccgtcaaggacatagatctgctgcctttcccgattgaccagcgagatgcagcaccagacggtgaacccgcagatgacggcgcaaccggctatggttgcgaacaccgtcatcatggcgagtcttgtcttttgtgcaagggattctataagcatattctttctttttaagttatttgaccattgattttcccatcgttcctgccgcgcctatcgctgcgccagccgcacctccagccattgagcctgccgtagatgtgatgcccgttgccacagagcctgccgcagtcgccgcacttgaactgacaccgccgggaatcggccacgaggcgacttcgggaacaaagcggatgatgtaggcacccaccagcattcccatggcgtacatgcagttggagccgatgccctgaagccccaacgctccgatttgcgaccaggagttgaccgacccgtgcaacaggtggttataagccaccaagtcctgttgcaggttatacagcagaatgaagtcgatatagtacaggcacatataggttacgaagccccacaacgagagggaaaggtatttcgacatccactggctccatgccgaactccacggcggcgcaagggaaagggcgaacatgatgggacagaatatcatcaggattgccatgaatatccgctgcgccacaaggatgccgtaataggacatctggaaaatcaactcgccgacaaagcggatgacatcgttgatccattcgctgaccttggtttcagtagcgacggcggcacgctgcgcatagttgttgatggtattgcctagattgctcacgttgtagataagcttgtcccaccaggcggcatcctcaccgatggcggctatctgcttggcggtggagatggaatcctgcacggctctcagccggtccagatactcactttgcttctgcgccagcttcaactcgaaagcggcgacttccttgttcttggactgcgccatcgccttggtagccgactctagccccttgccgggcacttgcaaagccgagcagatccatgacgaagaagagatgcagagggagatgccgatgatacgcagcagcttcatgacatccatgccccgccgtccgagcatcatcatccagcactcgtaagagcctacgcaaagtgccaggcacagcccgatgacacgtgccagtccgaccgcatcgcccagcaccgccacgtttggaaaagactccatggcgaccaacaacttgtccagactctcgtcaatggcaggcagtccgatggttaaaagggtatataaaaggttcataattcttattccgttttattgattgttcactatccattttaatttcaataatgggttgccgccaccgcgcacagatgggcggttcggttgaccagttcctccattttcgccttggcttcctcgtaagcctgctgccgcttggcgttctccagttcataaccgactcccgtcttgtggatataggcgatgtccgcacaaaggagttcgttctgtcggctcagctcgttcacttggtattccagcttgccgccactcttcttcatgcaataaagcagaccgtccgtgatacggtcctgcatccggttgaactcgtccttgtaggaagcgtaagtcaagtccacgttccggtcggcttcccttaccagctcttccttgtacagttcctctatccgtttccgttcttcctccaccttcttcactttctgccgctgtgtctcctcggaggtaacacgggtcggcatgatgcgcttgacattggacttcggctctttgaaacgcacccggaagccggatttgaatcccgcccatttccagtacatttctgcaccggagtatttctggtgcaggaaataatagtaccagtccggagcgaagtcccaaggaccgttttccatggatgtccactgccgctgtttctccttgtcgttccttgtccgctgggcatctgcggaaagcggaatgcctgccaatgccgtacaaagcaggcaggcgatgatggttctaacttgcatatccctgattccatttgttgatgaccttgtccgctatctcgtccttgatggtggagttcaggatttcccagatgtaatccggcttccaaccgcagctcgtaaccagatagcagtagaggttcgcattgtcaatgatgtaccgtgccttgtcgatggtacttttaagtgtcagcaccaagttcagcttctcgtccatggacgccttcatcaggttgatgccggaagcagccaccgaagcgtagagcttgtagcagtgcttcacctcccgggaaatggcgacattggcatccgcatagtaccatgccacgaagggcttttgggaaaccgactggaacgtgttcccggtaaaatccttgtagtcccggaccaactggtacagggaattggcggttgacgagatggcacctgccagcaccaaataggaatgtgcattgcccagccgggtgtcgagagtagtgcgtacctcgttgaacttgtttgcccccttggttacaagcgattgctcgccgaagctcatggcaacacgctgcatggcttggtcttcatccttcttcaccgccttgtgaagcgcaatcaacgcctcaatggtcggcaggtctttgggcacgacaacagcggatgcttggacggacaatgccagcatcaaaccgacagtgcctattgttattttccagtgtctcatatattataaaggtgaatggattagtaattggctgcgaccagtccgttccagtcccgaatcagcccgccgacttgattcttcatggtaacgatgttcgcccagccctccgggtcaatggcaaagaagaggtcattcaccgtggcgtattgtgccatcagcatcatgccctccaccttgtagcgtatctccatcagtccggtatagatgctgttggccagcgtcagccgctcatagcggtcaagcaggttatagccatcgttcttcttctcggctgttccttgacctttgagcggattctgcaccttggcattgttcacgatattcacgaagttccccaccagttgctgcgtttccattactaaaccgcccagttccgtaaggcaatagagcttgttcgtgaacttggcttggttcacggttttgataagctccggcacgtctttgagaatgtcaaaggcgcaggagccgatttccttgtaatagcggctttccgttccgaagccggacacgttctccatcgtcagcttgtacagctccttgatggtagccatgctgaccgaatagagttccaccttcttctttttggcggtgatggagtccagacgctggttatgctgatcctcaatcagcttttgtgaggcggtgttggacgtaaccaccttgacgcagttcttgtcaatgaccaccttccagcctgcatacatcggggtggatgcaataaccagcaacaacattgataagacaaaccgtagctttatgaactttgactttaccatgatgacattactttttgatgatggttgacttttcttgcaaattcgagatacttgggacttccgtcctttttccggtctgcctcaatatgggttatcgcttcctgcatggtgccgtagaaagcgagataaatcttcaaggcttccttctcggttcgttccgttgtataagcccagtaacattcgggggcttcctccacgccatagacatccgaatgctgtccccggcaaatccacacctccttgaagtagctgcgtccttcccggttgttcagggcattgatggtaaaaatctgttgtcgctggatggaagtcaatcccaagatggcggcaatttcctcgtacctgtccttgaacttcgtctggtcgagcagtatcttcacatcggagttgttgatgatggcctccttgacgatgggcgaatcaatcacgtcattcagttcctgcgtaaccactccggcaatgccgtgaaacttacggacggtcttataaaggtacttgatgtactccgccatagtaggagaagcaatcgctttccatgcctcttcgattatcagtgccttgcgccctttcttgatgcgcatcttttgcaggaacacatccatgataatcagcaccacgataggaaaaagcacggggtcatccttgattttgtcaatttcaaagacgatgaaacgctcgtcaaagaggttcacatccaagtcggagttcaacgtggcttccagttcgccgccccggtagaactgtttcaggatggctgcgaagtcacggatgttgaaactgattttctccaacgaggtgatttgcgggatgcgctccagggcaaactcatagtaggagttgaaggaaagctccctgaccttcaacctccgtttctgttcttccatgtggtcgatttgcttctcaatcttaatcagcatggaattgttatacaattctttcttgtaggtctcaatgatgcgaagggcacgttccttctcggaaagggttgccgcctcgtcattcacaagggcggtcaatgaccggcactggcggatgagcttcagacggcgcacttccgaaggcagcaggagcgcacggctttccggcttttctgaaacctcctccgtgtttatctggttgtcaatgtcctccatgccgtgagcgaactgctcgtagtcatcctccatcttggctgccaccagcagtttctgacgcaagccgtccctttcctcctcggtgaacttgtcaaacggctggaaataggcttggtaatactccacgatggtctggtttatcagcatgccctcaatcttggtcgggaacgcattgcctttgaatatcaggaatatcaacgatttcaggaagttcttcttctccccgaagttcaagtcatattcctctttcgttaccttgaacggattcatggagatgggcttctccttggagtagctgatataggtgcccttgtagtagccgcagataccttcgtaggagtctccggtatctaccatgaccacatcggtctgctgttccagcaactggcggacaacgctgttcatgtggaagctcttgccgctgccgcttggtccgatacagaagaagttggcgttgtcggtcatcttgaccttgccttcctttccggtgatgtcaatacataccggcagtccctgacggtcggtgtagtacgtggtcagcggagtctcttccgaacctttcagatgctccttgaagaagaagcacaatgccgcatccgagagggtcaggaaaaggtcatagtcgggattgaaggcgtaggcattgccgggaaagctgtccgtgaaaagctccaattggttgtacgcgcttttggacggcatgatgccgcactcatacagcttggtctccagataggatgttaccggagttactttatccaccggacagctcaccagcatattgaagttgctatataccagcagcgtgctgtccacggcaagacggtcaagcacctcctcgatgtccgccttggcaatcttgttgctggggtcgggcatggagccgtgccgtttcgctttgccctgcagcttgcggagcagcttgcgctgttcgggaatctgcaccacctggttgaaaaccacacagtccgagaagggcacttgcgtcaggaaggagaacaggtcggtggcgatggcatagccgttgacgctcatctgcgtatagggcttgaccatggacgggaggtttatctcgtcgatgtccaccagcggataggaacggataacccggtttccgattttgagatactcgtccgatgccttgaagttggtcatggagaaagagccgtgccggaactggaacgccatgaagcggtggcaatactcgttgacctcctccttggtcagcaggcggtgccggatatgcttctcggtaagcatgtcgtccaccttggcgaccttggcatggaagtccagccatttcttggggtcatactgcacaaactggctgcgctgcgcctcctgcgtgactatcagataggtgcgtatctccgtgaactcccttccctcaaagtagttgaagtagctccgggtcaggaactcggcatcttccggtacctcatggtggtagctctgcttgcaaaggatgtcctgcttctgcaaggcatagccttccccaagcgtctgcaacacaccgcccagcacctcctgaaagcgtatgtactgctccgcatccgtacacaactgctgtacgggattggtcatttcaaaaatgattgaaggttctcccttggctgagaaaaggacgacatgaccgtccgtttcctccaactgcgcatagagaccgtcaaatactttttttcgggtatgtgccatagctgtttactctttttgattacatatcacgtttcaatttcttataaacatagatgcctttggaccgcttcttgttgtgcagtcctccacgctgcttgacatagatgaccgccagtccgaccaccgccgttaccagcatggcgatgaatccggcgagcttccccaagacgatggagaatgcaatgaaactgacaaaggagataccgatggccgctgccgccagcgtgagaaaacgcccgcggatgcccatgaactccaacggtttctgcaaccccttgaatacgggataaccctcctgattcatcgtcatgatgctgttgtatatttattgtaactacttgaagaacagcggcaaggcttccgacagggcaatgaacgcgatacagcctccgatagtcatcataatggtcttttttacgtcctggtcaccgttttgcatcttgaaataaacattgaaggcacctaccagaacgatgactgcggcgatggctttcatcaggttggaaacgggttcttgataggaactgacttcctgcgtggccttggtaaaaccggctgcgcccttgctggctgccatgacgtcgccaactgaaaggacaagggctgtcacggcgaacatacttctctgtgcgaatgtggaagccatgaaacgctccgccgcacgttgtaatctcttttttaactgttgcatttttttaatcatgttaatgggttctatcaccaaaggaacagaggtcgctaaaggaacggtatgtataagatatgctcttatcttgcgttttcacaggtgaatatgagtgttccaaggtcgcaggtgccggtctccgccagcctgtctatcgcgccgataatatcctctacaaggatgccgtcagtcatgatggcttcccgatagcccggacggtgaaagggctgttccgaaggggactgcggtttctgtccggcttcatcttcctcattattctcagacggctcctgcgtcttcccgggttcatcccggcttatcttgattggcttgaaggtctgcgcttcatccgatatgtctatctcttcctcggcatgattgtcttgctccgccaactgtgctgccttggctttctgtatgtccatcacaatcagtaccgcataatagagaaggaaggcgataaacagaataaatactatttgtccgtattgcatggttgtatgttatatgatagtggataaaacggataattcatttcccgggaaaggcaggaagtgaagtcccagcttgacaccccggcattccagccgttccttgcgctcgacgtttcctgtatagtacaggatgttgcgctcttgccccacgacatagccgatgcctttcagccgggaacggaggcggactcttgcccggtttgacacgaccttgatgcgtgttgccggagagagtccgaagatgacacggcgtctttcccggcgtatcatctcgccacggacacgggaagagacacggtaaatctcttccttggtacgtttcagtccgagctttgccgcaatgcggctgacgctcatcttggaaatgcccaactcctttgccatttcggagaaagacttgtcttgaaaatggctgcggatatgttcggcacgttccatccatcgggacttggcgaccttgacgatgcccaacttctttgccttgttctttaccgccgtctcgctcatgcccagcaaagcggctgtataagccgtggtctctaccgggtaggtttcggcaagcacagctatcagactgtcattccatctgctctttcccatggtcattcctccctgaaattggcaagcaacgacttcttctcacggcggaagcgggcaagctgcggcaggtacacgtcaaagaaggcacggacaatcgcattgaccagatcggaacggcaacggttgtgaatgttgcagtcgtccaatgagtcggcaaggtcgcggtctagcttgcataccagacggtcgttcctgccgtctctcgtatcggaggattcaagatgggagaggaaactgttccagcacttgtctatattgtccatgaagggaacaatagcttctactttttcaggtagctcttcttggatgaagtttttcgtttccgatgtctcctgcacttcggattggtcctgaggttcatccgtcaggctgatgtcagggtcattgattccctttatcaagtcgtctatttccggaatatcttttgtcattgcgttatgggtattgatgttgctgattatgttattgttcactttctgtagaggttacttgttgctcttcatttttcttgcccttcttctcagtcagctgtatgcctgaaaggacagtttcccgaatcggtttctccgtatcgaagatgctgacatagattctttcaaagacaggggcgacaatgctgccctgcatgtcaagggcggccatggtgctgaaacgctccatgtcggcacgcttgggaaccttggcggttacatagccgtagttggagaaggtttccctcgcattttcccaaatgaccagttcggagcgtttgccgaccctgccgtcatgcaggttggggatgatgaagagccgtgccttcatccgttcaccgacagctcttctcagacggtctatgaacatcaggaagctggcggtagagggaacggttaccaaatcgtaatggaaagggacgacgatgatgtccgagttgacgaacatgggaaccagaccgtccgctttcagactgccaggagagtccatgagcaccacgtctatgctcggatcgttgtggagcttttccatcagtgaagtcatggcattcttgtcgttggcttcatatgccaatacatcgtagggcatctgctgctcgccgtacttcttgctgtccgccttgcggcacttgatgatggagtgctggaagtcgcagtcaaccaccacgacacgcactcccttcgtcaccagataattggcgaaggttacgcagagcgtcgtcttgccgacgcctcctttctggttggcgaatgtcactatgaccggtgtctgtatcattgcagtgcgattattgattttgcgccaaaattatcatccggtgaacccgaaaaacgaaatgcgcaacacttatatgcttttggtcggtctgacctgaatgtatggaacactccatatcagagattctgggttggcggaaactgaaaaggttacggcagaaagtccataaaaacttttaccgtaacctttcgtttgtatggcattatcttttcagggaacgtccgtcatccacttcaccgtagccgtctttctgtccgacttcccattcgcgtttttcgctgtggctgccgcttccgctgtcgcgcagcttgacataacgggacagaggtttatgcgtaggagtggctgacggatgctgccgttgctgtctcggagctttccgtttcagccgttcaaggtcaaggccttcttcggtcaggttgacgatgatgtgttgcttgaaattgaccgcataggtagcgttctcgtcctgacggatggtgaaaccttccgcataaagaccacccttgaccgaagtaacagtttcatcctcaaaaacagcacggaggcggttgacggcatccgcataggcagttgtccgttccgacgaaagggaaacaaggtctggacggttcaccttgaaaataccgcacagtaaatcccgttccgcttcggtggaaggcttgaacttctccacccatgcgatgcggttgttgcggtctatcgcttccgccatgaacggcttcaagagacgggattgaccgttgaagtagatgacacctttctttatataggcgtgctgtttccgtatcttgccgtaaatctcgctttgggtcgtcttgggattgagggtaagcaggcggtctatgaaatcctcaatgcggttgaagcgttcttcgggagtggcaaagtccagcagctcgtccacagacagtactcttgcaccgtggatgacggtctggctggcatggtcaatcagcatgtatccgtaagccgcatccttcttgccgaagaagacaaggtcgatgccgaacttggctttcagttccttctgtagctcttccttgttcgtgcttatgtcccggtactttttgaggatgctccgcagctggcggcaacgtgccctttcccggtagccgcttttatacagtacctcgatgtcggacaggggaagtttccgctgtaccgtgccgccttgtttgacaaacaccgttccgtccttctgatagacttcatagcccatggaaaccatgaccgccttgaactgggcgaaggaggagatggtgtacttcttggcggcagctatgtcatcatcggtcttctgtttccggtcgttgccgagaagccggtcaatgacttcctgcgaccgcctgcgctcatggtcgtgggctatcttctttccgtcgggggagatgcgtgaggtaacgatatgcaggtgggtgttgtccgtgtcgtagtgggaatagaccagcagcggttgctcgggttcgccatatcccatttcctgaagataccggtgtgcgaactccagcatctcggattccgaacgctcgtgtcccttgcaggagaaggctacatgatactgggctttccggattctgctgtttcgggatgtatattcctgaaggtacttgaccagttcatcaggggtaggcttgccgaatgttccgagtgccccgaaattctgcatttcgagtaaccgggctacgcctttcgagactttccgctcattgtaaccgactgcatggaagtccgagcttccgggtaatatggtaactatcatcttgagttctgtttatcggggttcttgaataccttgcaaccaaagtattcggatttaagggtaatcagagcttgacggcttttcgggttacggcatccagttccttctttatcccgttcaatgtctttcgggtttcaagaatggtcggcatcaagacctcttggatatactcaggagccagcagtccggctaccgcaagctcgttggctcgcttgaccgactggttcaggtttccgcccgcccaggacagttcgttctgaaacttccggtaaaacagaccgaggtcattgataagttcgagcttcttcttgacatccatgttggaatactccgccacagccgaacggatataatggcttacggagctgtacgaagccgatttctctttaagcagcgcggcttcctccggggtaagccgcaactgaaatactttggttctctgtttcgtcatactatgatacatcggttgatgggtttcctggaacatatttcgcagggcgaaacagcgatgcaatcgccccgatgcgcagcagtcggcaagttacctttggcaggataaaacggagttttgtaatgacaaaggtacaacttgcttgacaaatcctgcaacgcaggtcaatatcctcccgggttctttattgcaccaaagttatcacccaagaacgccttgcggagaaatgtacaacagaattgttcgcaagaagttagttgccaactgaaagtccttggacactgcaatctgagataactggttattgggtttctctatatcgagaaaccgaaggcttccgatttcgggagataattgatgcgaacattcatagactgagagattagaggttgttcggtttgtaaatacaggaagtgataaatagctgcatttcgcagttagcaaggaacgctgtttcaagatatacatattccgagatatgaaggtggaatgttatcgcaaactcatgttgtgaatgaccgaatacttgaatgttcaagattccaatgatgccaatagcagggaaaagaagtatctgataaagtggaaatgatagtagccgaagtattggaaagagcagtccgtttatcgttagatttattagatatatgagatttgggtagagagcattttgagtttgttcaaccgagctttcaaggttctaaggcactcgaatatttggtataattaactgaatataagtgatatataatttcataaagtcgctatttttgagtatctttaaggtagagattcatagctctatctatcatgtttaagtaaaagttacatcgtatgtttgagatattgttattgatatacctgttcccgattatggtgatagccatgttgcttgtcaagctggcgatatggattgtcaggaacttattcaagtttgtcctatggcttgtccggacgctgtttgtccttttaggcaaagggctgctgcttgcttttgcgtttgtggcagctaagaaacctttcaatcatccgccggacagatagggaaaaacaaactgtacctgtcaaatgatgaccggtacagttttgtgaacggaaaatgaattgttttccctttacgttattaaatgcactttttaaatggcaactaaaaacctttgcctttgcatcgctcataaactgcttctttttgtgtgtcgcagttggtcagacggaactggacattacaaccggtagggatgtccttgggtagttgttttacaagccttgcgatgacttcatccacattattaaagccaatgtcggtaagttctcctacaaccttccctttgaaataggcacgtccatatatcattctcttaggagagatacggaacagggcatctttaggctcttcaaggtcaagagcctttccttgcttactttgttcatcactgaaaaagatgaaatcaataattttggcattgagttcccatgctggagtaaagtccagcttcatatagccccttgtgatattaaatccatgactatggttcattccaaatgccacttcgtaaatattggctccgcagtcattttgagcaatggttgcccatgtatgccggaaagtatagaaacaataacaatcttctttactcatacccatatccagacaaatctttcgtattccgatgtttacattcgcattgaaactgtcggaattgctgtaacgcttgtggaagttaaatagatattcttcattttcatcagtagagagatatttgtcaaacgtggattggataaacggttcaactctcatttccatataaccttcatcacggcgactgtttctaatctttgctctcttatagccaatgactccattttggtagtctttctttttgagttcgtacaaatcaacagaattgatgccacccatgcaaagagaaagaagggcaacatctcttcccaattccggcagggaggaaatcattttgcttacaggcaacggacgattgaaaaactcacgacaagcctctgcgctaatggcacgctttagtgttgtatctgacttggggatttgaactttgtgccacggattaaacttgatacgtattatatcacgttcttcatcattatattccgctatcgcgcttttaaaaatctgtcgaatacaaatcggatacatttctttggctctattggttaaagaaagggatgcaatccatttctttagtacggttgatgtcaagtgattaaacatcacatgggttgttccaagataacgctccaaatgactaacagcaagacgataattcttcgcattacgttcgtgccccccacgaatcatacgattgatatgcagagttgcatattcgctaaagcaaacattatcctctacgtgagtaagatactctatcagttctgaaacagagtattcggatatatccttgcggttcgccatatcggtgtatttcaggatttccctggaacaatattcatttactaccgcatctttaatttctccagactttagaatttgcttatctgtaatgagcttaccagttttgatataacccattctggaccggtgaacgatgcgaatgtacaccggataaaagccatcggctcttttctttcttacaactgctttaaatgtagccatatatctataatttaatggtgtatgctttggtgtatgcgcctatattcacaagtgtatgtccaggtgtatgcaaataccgttcatttggctattcttatgcggtcaaatgaacgaaccgtctgaaaacagattaggctgtaatgccttatttacaagtcattacagcctaattcaataactaagtcggaactaccgttattcctctatagccgcctgcgccgccgccaatcttgcaataggcactcggaacggagagcagctaacgtagttcaatcctactctgtgacagaatttcactgaagaaggttcgccaccgtgctcaccacaaataccacatttcaagtccggacgaattgcacggcctttttctgttgccatacgtaccaactgtcccacaccattctggtcgagcacttggaacgggtctactttcaaaatcttcttttccagataaacaggaaggaaagaagcaatatcgtcacgagaataaccgaaggtcatctgtgtcaagtcattcgtaccgaatgagaagaattcggcagaagaagcaatacggtctgcagttaacgcagcacgcgggatttcgatcattgtacctactttaaagtcaatgctgtctcccagttcctcaaacaacttcgctgcttccgtgcgaatcacattttcctgttccttaaattcatataagataccagtcaacggaaccatgatttcaggatgtgtttctacaccttctttcttcaattccaatgcagcacccaagatagcacgtgtctgcatctgagtgatttcaggataagtatttcccagacggcaaccacggtgacccaacatcgggttatgttcacacagagactctacacgctgctggatatattgcaggcttacacccattgtatccgccatttcctgttgtcctttcagatcgtgaggaacaaactcatgcaaaggaggatcgagcagacgcactgtcaccggacaacctgccattgccttaaagatacccttaaaatcggcctgttgatacggcagaatcttagccaatgccttacggcgtccttccgcatcttctgccaagatcatttcgcgcattgccttgatcttttccccttcaaagaacatgtgttccgtacggcaaagaccgatacccacagcgccgaaattacgtgctacttccgcatcatgaggagtatccgcattcgtacgcacttgcaaacgggtatatttatcagcaagcgtcatcaattcggcaaagtcaccggaaagctcggcagctttcgtttctactttaccattatatactacacccgtacttccgttcaaagagatgtaatcaccttctttcagaacaacaccgtcaatttctacggtacgagccttataatcaatattcaaagcacctgcacctgatacacagcatttacccataccacgagctaccacagcagcatgagaagtcataccaccacgagcggtaaggataccctcagcaactgccataccggccaagtcttcaggagaagtttcgatacgaaccattaccacacgcttgccggcagcatgccattcggcagcgtcatcagcaaaaaatacaatctgaccggttgcagcacccggagaagccggaagaccacgggtcaggacttttgcagctttcaaagcgtccttatcaaataccggatgaagaagttcgtcaagtttattcggttcaacacgcatcaaagctgttttctcatcaatcatgccttggtggagcaaatccatagcaatcttcaccatggcggcacctgtacgtttaccgttacgagtctggaggaaccaaagtttaccttcctgtacggtgaactccatgtcctgcatatccttgtagtgattttccagcttagtctgaagcgcatccaattcttgatagatttccggcatggcttcttccatagaaggatatttcgcagcacgttcttcttcgcttactccggccaactgtgcccaacgttgagaaccgatcttggtaatctgttgcggagtacggataccggctaccacgtcttcaccttgtgcgttaatcagatattcaccgttgaaaaggtcttcacccgtagcagcgtcacgtgagaaacaaacacctgtcgcagaagtatcgcccatattaccgaataccatagcctgcacatttacagctgttccccattcgtcaggaatgccttccattttacgataaaggatagcacgttcgttcatccatgaatcgaatacggcgcagatagctccccaaagttgctcgtatgcacaagtcgggaaatcctttcctgtctgttctttcacggcagccttgaacttcttgacaagttctttcaagtcttccacttcaagttcattgtctagttttacgcctttcgcgtgtttcacttcttcaataattttctcgaacgggtcgatatcctctttatttgtaggcttcatgcccagtacaacgtcaccgtacatttgtacgaaacgacgataagagtcccatgcaaaacgtgcgttaccggtcttgcggataataccttctaccacttcgtcattcaaacccaagttcagaatagtatccatcatacccggcatagatgcgcgtgcacccgaacgaaccgataccagcaacgggttgtcaatgtcaccaaatttagatttcatcaacgcctctacattagcaatggcttttacgacatcatctttcagcaactcaaccactttatcacgtcctaatgtattgtattctgtacaaacatctgttgttattgtaaatccggggggaactggaattccgattaaattcatttcggcaagattagcacctttaccgcctaacaaattcttcatgtcagcttttccttctgcctgaccatttccaaagatataaactctttttttatccataatattgtgtttaaagttacattatgacttttttctgttcgcaaatctaagtatatttcgcaaaccagaaaactttttgagaaaaaactttctatcaaaatgcaatttcgacattacaatctggaatatttctgtatacacgaaaattttccaaaaaaaatacctacttttgcaaagtaattattagactggtgtaaaagtggcaagaaagaaaaaagaacttcccttattggagaaggtaacaatcatggatgtggctgccgaaggaaaagccattgcaaaagtaaacgacctggtaatttttgttccttacgtagtgccgggtgatgtcgtagacctgcaaatcaagcgtaaaaaaaataaatatgccgaagccgaagcggtaaagttccacgaactatcgcccaatcgtgcagttcctttctgccagcactatggtgtttgcggcggctgtaaatggcaagtgctaccctacccggagcagatcaaatacaagcaaaagcaggtggaagacaacctgagacgtatcggaaagattgaacttccggagatttcgccgattttaggttccgcaaaaacagagttttaccggaacaaactggaatttacattttccaacaaacgttggttgacgaacgaagaagtccgtcaggatgtgaagtatgaccagatgaatgcagtaggtttccatattccgggagcattcgacaaggtattggcaatcgaaaagtgctggttgcaggatgatatatccaaccggattcgtaatgcgatacgcgattatgcttatgagcatgactactcatttatcaacctgcgtacgcaagaaggtatgttacggaatatgattgtccgcacttcctccacaggtgaactaatggtaatcgtgatctgcaagattacggaagatcatgaaatggaactgttcaagcagttgcttcaattcgtggcagattctttcccggaaataacttctctcctatacattattaataataagtgcaacgatacgatcaatgatctggatgtgtatgtgttcaaaggaaacgatcatatctttgaagaaatggaaggattgcgtttcaaagtgggaccgaaatcattctatcaaacaaattcagaacaggcatataatttatataaggtaacccgcgagtttgccggactgaccggaaatgaacttgtatatgacctttacaccggaaccggaactatcgccaacttcgtatcacgccgggctcgtcaggtgattggtatcgagtatgtgccggaagccattgaagacgcaaaggtgaacgcagaaatcaacgatattaagaataccctgttttatgcaggtgacatgaaggatattctgactcaggaatttatcaacgagcatggacgtccggatgttatcatcaccgaccctcctcgtgcaggtatgcatcaggatgtggtggatgtaatcttgtttgccgaacccaaacgaattgtttacgtaagctgtaatcccgccactcaggcacgtgacctgcaattactggacgaaaaatataaggtgaaggccgtgcagccggtagatatgttccctcatactcaccacgtggaaaatgtggtattgctggaactccgataatctttaattgaatcgtccttaaaagaaaaaagaaatggaaaaaagaccgagaagaactcctgctgaaaaagcacgtgcacaatataccaattatgcagtcaaagagccaatggaactaatggagttcctgactgccaaaatgccggacgcaagccgtacaaaactaaagtcattgctcagcaaacgagtggtattggtagataatgtaataaccacgcaattcaactttccgttgaaaccgggaatgaaagttcaaatcagcaaagataaaggaaggaaagaatttaataaccgattgctgaaaattgtgtacgaagacgcatatatcattgtggtcgaaaagatgcaaggacttttgtccgtcaatacggaacgtcaaaaagagcgcacagcctataccatacttaatgaatatgtgcaacgttccggacgtcaacaccgagtgtacattgtacatcgtctggacagagacacttccggattgatgatgtttgccaaggacgaaaagacacaacgtactctgcgcgacaactggcatgatatagtgaccgaccgtcggtatgtagccgtagtagaaggaagtatggaaaaagattatgatactgttgtttcctggctgacggacaagactttatacgtaagttccagtggatatgacgacggcggttcaaagtctatcactcattatagaacaatcaaacgtgccaacggatattctttagtggaacttgatttagagaccggacgtaaaaaccagattcgtgtacacatgcaggatttaggacatccgattgccggagacggaagatatggaggagaaaattactctaacccgatcggtcgattggcccttcatgctttcaaactgtgtttctatcatcctgtaacgggagatctaatggagtttgaaacaccttatccgggagaattcaagaagttgtttctgaaaaaatagaataaatacaagttaaaagaaaggagctataccatttatacacaagtatggctcctttctatatctattatattattttcttattgcattctcaactcaatatatccgaaaaactcgccatcaagatatagatcacctcgcatataacgtccgctcacacgaacacctctcacctcacgcagagcaaaatcataaccataatcaaggtataaagttccataatctacccgccaacgaaaaggcaagtcaccggcagaagcgccgtcataatcatagacctgataatcaattcccaagccgttattatccaagcgaataccgctttctatcggatctctgttagtaccaaatcccaaatctccaacccatgttctccccatgaggtcatcataaatatcttcatcatcctcacatgaagtaaagccgacaagcaacgtcagcatcagcagaaaacctgcgtattttttaatcagtttcataatcttctagtttattgcgtttataaatacaaatttagcgtttttattttactatatgctccaagccataagttttttgtacctttgttcccgataatattaaaaattctacatgaaacttctttggcttgatttaaatagctcctatgcacactcatcgttggcgctccctgcattacacgcccagatagcagacgacactactattgaatggtgtatagtatcggcaaccataaatgaaaataccggaatggttgtcagccggattcacaaacaccggccggacatcattgccgccaccaactggttattcaatcacgaacagttgctacacatcatatcccgtgctaaagcattacttccgcattgctgcatcgtactcggcggtcccgagtttttgggaaataatgaagcctttttatataagaacaaatttgtcagcggagtgttccgtggagagggtgaagaagtattcccccaatggctgaaagtatggaatcacagtaaagaaacatggaaagcaataacgggactttgttacttggatgaaaacggtcgctatcaggacaatggaattgcccgcgtcatgaacttctctcaacttgtttcccccgagaaaagttgtttttttaactggagtaaaccgtttgtacagttggaaactacccgaggttgtttcaacacgtgtgccttttgcgtcagcggtggtgaaaagccggtgcgtaccattcctttggaagctatccgtgaacgtctgaatgacattcaccagcatggcattaagaacgtgcgcgtactcgaccgtacttttaattataacaacaaacgggctaaagaattactggacttattccggcaatatccggacatctgttttcatctggagattcatccggctctcctttccgaagaattaaaacaggaattatcggtcttacccaaggggttattacatttggaggccggcattcaaagtttaaaagagtcggttctgcaacaaagccgccgtatcggaaagttatccgacgcattggaaggattaaaatatctctgttcactaaagaatatggaaacgcatgctgacctcatagcaggtctcccactctatcacttatccgagatattcgaagacgtccgtaccttggcagaatacggcgcaggagagattcaactggaatccctaaagttacttcccggtaccgagatgcggagaagagcagaagaactaggcattcaatactcgccccttcccccttatgaagtcctccaaacacgtgagatttcagtagacgagttacagacagcgcattatctatcccgcctgttagacggcttctataatactcctacctggcaaaacatcacccggatgcttattctggaaaatcctcgtttcttacatgagttgctcgatcatttagttcaggcagatatcatcgacaccccgttaagtctggaaagaagaggattgatcctatataatttctgtaaaaatcattatcccgattacttgactcaagtcagtatcgcatggatcgaagcaggtatgtcattaaagaaagttcccgccgaaaaagtcagaaccaaacggcaagttcccccggagagttgggaagtcatctatggctcctatcgggaaaaactacgtctgtgttttctccccgttgatgaagacggacatggctactggttcggatttgagtctgaaatccaaaagatagaacccgtattcaaagctatttcataatgatgaataatctacaagaaaagttttagaagccaaggagacacaacttccattttattctctacctttgtagaacgattaaataacatcatataataatgaaaaactttatcaagggattccggtttaccccctccaattatccggcagcagtagaagacaaaatacagaaatatagaaaacaaggatacaaacttccgccccgtaaagtgctccgtacccccgaacaactggaaggaatacgtgaaagtgccaaaatcaacactgcattattggatcatatcgcggagaatatccgtgaaggaatgtctaccgaggaaattgacagactagtatatgatttcacgaccggtcacggagccgttcctgctcccctcaattacgaaggattccccaagagtgtctgtacaagcattaacgacgtagtatgccatgggatacccaacaagaatgaaatcctgaaaaacggagatattatcaatgtggatgtctctaccatttacaatggatacttctctgacgcctcccgcatgtttatgatcggcgacgtaagtcccgaaatgcgcaaactggtccaagtgacgaaagagtgtatggaaattggtattgccgccgcacaaccttggaaacaactgggcgatgtgggtgccgctattcaggaacatgccgagaaaaacggattcagcgtcgtgcgcgacctctgcggacacggtgtaggcatgaaattccatgaagaaccggatgtagagcatttcggacgccggggaacaggcatgatgatcgtaccgggaatgactttcaccattgagccgatgattaatatgggaacctatgaagtgtttgtcgacgaagctgacggctggaccgtctgcacagatgacggattgccctctgcccaatgggagaatatgattctgattactgaaaccggaaatgaaatcctgacttattaaatggaatcgattttacttattgttatcgccgtattagtgatagtattacttgtactatcactaacgaaaggcaacaaccaaaatcaagcggaacaactgcaagcagccttacggcaacaaatgcaagaaaaccgggaagaactgaaccgaagtatccgggagttgcgcatggaaatgacgcaagtattaaatcagaatatgcagcaactccaggatgtcctccacaagaatatgatgaccacaggagaattacaacggcagaaattcgacacaatggcccgccaacaggaaacactgattaaatcgaccgagaaacgcttggatgatatgcgtctaatggttgaagaaaagttgcaaaaaacgttgaacgaacgaattgggcagtcatttgagattgtccgttcgcaactggaaaatgtgcagaaaggtctgggagaaatgaaatctctggcccaggatgtcggcggactgaagaaggtactgagcaacgtaaaaatgcggggaacattcggtgaggtacagttaggtgcattactggagcaaatgatgagcccggaacaatacgacgccaatgtcaaaacgaagaaaagcggaacggagtttgtagaatttgctatcaaactgccgggaaaagacgatgtgaacagcacggtctatctcccgattgatgccaaattccccaaagacatatacgaacagtattacgatgctttcgaagcgggagataccgctttgatcgaatcgtccggcaaacaactggaaaacaccattaaaaaaatggcaaaggatattcacgacaaatatgtcgaccctccttttaccacagatttcgcaatcatgtttttaccgttcgaaagtatctatgcagaagttatccgacggacaagccttgtcgaaacacttcagaaggaatacaaaatcgtcgtaacaggcccgactactttaggagccattctgaacagccttcaaatgggtttccgtaccttagccattcagaaacgtaccggagaagtctggactgtattgggagctgtaaaaaccgaattcagcaaattcggcggactgcttgagaaagtacaaaagaacctgcaaaatgccggtgaccagcttgaagaagttatgggcaaacgaacccgtgctatcgaacggaagctacgtcaagtagaacaattaccacatgaagaaagccggaaaatacttccaatcgaagaagacggggaactatttgactaatccgaaaaaaaatagcgctaaaacgaatttgttaggaatatctttcttgaatgctagagggcgtgtctaataagtcggggtggtaggtagatgcacaatgctgataataaacaattcatgcattcacctaccacctccccctacgggtactcctccttcctgaaggaggagagttttaaatactaccgacttgtcattctgttattactccagtagtctccaactatgcagtctctaaactatgcagtctctaactttgcgatctctaactatgcagtctccaactattatcagtggagaaataagtattttattgatagttcaactttaacaaataattattccggagaactgtcttcacatcggtcactatccccatttcacattccttatccaccttcatactgacagtaatctcattcttcttatctccctgtaatgtacagaaatctttcaaatctctctccaattcagccagagtaaaattcgttatttctttctctactttgcctgcggcagagagtaatttaagatgaatgccggtaatcttcattgtagtagaattattatatggatttttctttctatccttgatagaaatatcgccataaccaatcaaaataggaaattctttatcaaggtattccttactgttatttcccgatgtttgggcaatatcagcccgaatttcaacaaaagcatcccgcataacagacaacaaatcttttacctgttctttaggagtatcaggagaaaacaagccccctcccacttgatcctctgcactgttatacttttcttttgccaggcgcttatgttccaccattgtttttttaagtacctctttcaggtcttccttagcaatcgttttattgttcaaagtcaattgtccattagcatctacttttacgatatgcgtctgtcgctcccgaatcttatatttcagctccgcattcttaggagaacgattataatatgcctccatttcatcatcaacaaacttgaagatatcctgatcttctccggtttttgattgcaatacttcccggaccgtatttagtcctaagtcttctttcacttccggctgtgcaaacgcataaagcgctccacccattacaggcaccacaaacaatagtttcaaccgtgcccaccgattggttctttcttttaacatcatagtaatacgttttttaagtttagagtgattaaaaccgttggccatagagtagagccttgtaccaacagcttttttcaccaataaaagttgatatctcgttgcatcaatgcctgtattaagcaccccattatccgcttcaaactcatgtacttcctgcaattcccgtttcagcagccaaatggccgggttgaaccaataaagaattaacaaacactgcatacataataaatcgagtgtatgccgataacgtaaatgcatcgtctcatggagtaagatcccgtctgtcgactgttgtgaatagtcggatacggaaacaacaatatattttccccagcaaaaagatgaaataggttccgatactacaatcagtttatacttcccataggagcgcctctttccgttccgtataagctggaacatccgataaaaggaaagcaaaatcctgcacaaaacaaacagcccgcctgccagataaacatatcccaaagcaataggacaccaatttatagcctgcatatttccggtttcgtccacttgcggccgaacccaaaacattgtgtcccaaaatatgccgtccgcctgctcaacaaaaatcccctgaatcgtttgtaaaggaacagttaaaaatgtctcctcttgagtggtaaattctatcaaagggagaaacatacatcctatgatccccgccaatatagtcacccggttgaagcgaaaaaaagtagttccgctcattaataatttaaagagcagatagaatattatcaggtaacatccggatttcaacagataaaacaataagtctcccatagtaatgacatctttttatcaatagtgcgtttcccaactattattgcaaaaactatttttcgtttttccctcgttgaatctggtcaatgagtgctttaagctcatcaacagacaatccttcttcttcaataaaagaagacacaacattgacatacgaattattatagtattgagaaatcacttctttaagagcagaacttttatactccttctccgaaacaagtgcataatattgataagtatttccataaggcgtataacctacgaatcctttctcctccaacccgcgcacaagagtggaaacggtattataatgcggtttgggatcttcataataagctaatagtccgcgaacaaacatcgggccgttttcccagaaaatacgcattatttcttcttcttttgctgtcaatcgtttcatacatttctatattttcggtttaactcaccaagtataacgccacaaatatagtatttaatatcgaacaaacaactaaaagatgcagttattcaactaaataaaacagttatttaactattcttattagtagatcagttccataccctattatttccatataataactaccggaaataatagggtatagagagtttatttaatcagtatagctccttaaagccagttttttcacccaaagaacaaatattccggtcaaaatcaagttcagtactaaagtaagtacagaaattaccaatgccggacctcccaaattatatcccaatgcgataaaaataattccggcccccacttcaccacgggtaaacataccgatagaaagtgccagtcgttcactcagcttccggtcacgatagaaaaacataggacataactttcccacgttcgacaacaaagaaacaattaccacatgaaacagaatcatcccccacgacatcatttcctgggaacctgtcaccgaatatgcccccgagtgcgtttccgcaaaattgactccgataaaatgaggcatactcattcctaccaggaacataaagaagaaagagattccggtagaaactctccgttccacaggcgtgtcatgttccttatgcttcataatcatacccaatacaaatgccggaagcagcacctcaatatggatacttcccgcctctccgtacagctccttgctaccgagatagagtatctgcgtagccagaaatatgataaccgaatagaacaggatcgctttccagtcctgacgccagtcgtatttattcaactgttgccaaccggcggccaacagcataaacacaatcaccacgacaataatcaactgccagcgcaatccgatcatcatgatctggagaggaatcatcaggatgatcgtatccaaatcatcgaaaatagccaatacctgaatcttcttataaatccaactggacttcagcccgatagcggcgagcatggtaaacaagattcccgctgatgtcggagcggcaaaacggctcaacagcaggttctctttccatgcttcccaactattccaatagtcaggcggaagcaagataaacacatagtagatagcaatcataaaccaaggcaaagcagcagtagccattgctataaaataatcctcggcataacttttccagcgggacttgtcgagcacaaattcccggcccacattaatcattataaaactaagacatacatagagtagtatattcgatatggacttcacggttccatacccctcacctgctatcaccggcaggaattgcgatacgacgagccccaacatcaggaagcccgaaaaagacagaacttttctcatatttctagttgttttttccccaaaagtgattgccaaggaaagctctgcagacagaaagcaatcacctggtgtattaaaaaactaaccgcaaggcaatttgttcagaaaacctctctgaaaaaactgcttgcggttcttttttttaatccagttttaatactgcgaggaaggctttctgcggcacttccacgttgccaatttgtttcattcgttttttaccttttttctgcttttcaagcagcttgcgcttacggctcacgtcaccgccataacatttggcagtcacatccttgcgaaccgccttaatcgtttcgcgggcaataattttcgccccgatagcggcttgaatagcaatctcaaactgctggcggggaatcagttccttcaacttctcacacatccggcgtcccatatcatacgcattgtcaaagtggatcagtgtagaaagcgcatccacaggctcaccattcagcatgatatccagcttgaccagtttcgagggacggaaaccgttcggatgataatcgaacgacgcatatcctttcgaaatacttttcaggcggtcatagaagtcaatcacaatttcccccaaaggcatattgtaatatatctccacccggttgccggaaatatattcctgtttaagcagttccccgcgcttgcccagacagagcgtcatgatcggacctatataatcggtcgttgtaataatagacgctttgatatacggttcttcaatgtgatctatcaacgtcggatcaggcataccaccggggttatgcacctccttcatattgccttgcttgtcatatatattgtaagatacgttaggcaccgtagtaatcacattcatatcaaactcacggtcaagacgttcctgcacaatctccatgtgaagcaacccgagaaaaccgcaacggaaaccgaagcccaacgccaacgatgattcgggctggaaagtcaaggaagcgtcgttcaactgcaatttctccagagaagcacgcaagtcttcaaaatcttccgcctcaatcgggtagaccccggcgaataccataggctttacttcctcaaaacccgcaatcgccttgtcacacggacgagccacatgggtaatggtgtctcccacctttacctctttcgaagtcttgataccggagatgatatagcctacatctcccgtgcgaagttcattccggggaaccagttccattttcagcacccccacctcatcggcgtcatactccttgccggtattgaaaaacttcactttgtcacctttacggatcactccgttctcaatcttgaaataagcgataattccacggaaagagttgaatacagagtcgaaaatcaaagcctgtaacggtgcttcctcatccccttcgggatgcgggatacgttcgataacggctgccaggatttcttccactcccatacccgtcttaccggatgcgcggataatttcttcccgcttgcaacccagcagttccacaatctcatcctccacttcctccggcatggcactggccatatcgcatttgttgataacgggaataatctcaaggtcgtgttcaatagccatatacaggttggagatcgtctgtgcctgtactccctgcgatgcatcgacaatcagcaatgcaccttcgcaagcggcaatggaacgggacacctcatacgaaaagtccacgtgccccggagtatcaatcaggttgagtacatacttctcccccttatagttatactccatttggatagcatggcttttgatcgtgatccctctttccttctccaagtccatatcatcaagcatctgccccgtggtcacctgaatggtgttggtaaactccaacaagcggtcggccagggttgacttaccgtggtcgatatgagcaataatgcaaaagttgcgtatattcttcatgctgaattcttattattttatctttttggtgtgcaaagatacgtaaatggcggaatataaaaaaatgcgttgataacattatgacaatgtaccaacgcatttttttattgcttaagtgattgctcgcttagatcaatttgatgaagagttcaccttccacttcttccacagagactttgtcttctctcaataaccagccaagtccgaggaacaaatctttgtcaaccaatttagttgcttttttcaattgcttggcagtcattccttctgtttcgttcagtgcattccagatagtacctgcgattacacctgctttttctttcaacatttgctttgaaattttagttagacatgcttcaaatcatcctgtccgacgactttcagattttatttcggggacaaagatagatatttttatgttatagaacactttattgagtgtttttttactgattttgtaataaaaaaagcattttttccttcatttagggtgtttttcgagatattccacccagattcttgccgcttcttccaccatttttgcgcacgggcgtttgctataatactgagctgtacgttcttccggaatagtggaaaccggttcttttttctttaatcccaacaattccgcacaaatcagagagccgttacgttttttaaattcggctgccagttcctgcactaccgcataattggcagcttttccttcccggtctgccgcctccgtagcccccgttttcaggccggccaccagaaacaacccgcacgcagccccgcacgtctcgcgcatgcgtcctattcctccgccgaaagaggcggccatacgcaatgcctgttcctgtgtaaatccgtacatatcggcaaaagcagccacaacagactgtgagcaattgtatccgctcttaaaaagctccaccgctttttgtattctatcttcttccataaactatttcgtgttttttatttccaacatcatcggacagtggtccgaatgcatggcgtcattcaagatacgtgcgctcatcagtaacgggcggaccggttcactggccatgcaatagtcgattctccaacccttattcttggcacgcgagttaaaacggtaactccaccaggtatactcctgtttttccggataaagcatacggaaagaatcaatgaatcccgctgcaaggaaacgggtcatccattcccgttcttcgggaaggaaaccactgttctttgcgttccggacagggtcatgaatatcaatcggctcgtggcaaatattataatcaccgcaaagaatcaggttcggacgagacttctgcaactccagcacatacttctgaaagtcttccagccacaccattttaaaagcctgacgctcatccccgcttgtccccgaaggatgataaacactgaccacggacaaatctccaaagtccgcacgtataaaacgcccctcattgtcgtatgcctccatacccattccgtactccacgtgatccggctcctgcttcgtaagtaaagccactccgctatatcctttcttttgtgccgaatacagataggacttatagcccaatgcttcgaacacctctcccggatactggtccggttgcagttttgtctcttgcagacaaagaatatcgggattctcctgctccagccactccggcagtcctttagatacggcagcacgaagcccgtttacattataagtaataatcttcatcattctatatttttaattcatgttcatttcaggagaatagcagcatgatgttcagtaccgatactataatcgcaatggaatacagcacaaatgtgctccaacggctattgacatactttcccattaccttccgcgaggaggtcagccccacttgcaggaataccgtgaaaggcaattggatgctgagtatcatctgcgaaataatcagtcctttaaaaggatctccgataaagaaaatcaacaacagggcaattcccaaagacaggagcacgcctacctgcgagtgactgtccttgatatgataagactcgccgaaaataccggcaaagatagaacctgccgccattccgcttgtgatagtggacgaaatgcccgccataagcaaagccagtgcaaacacgattgccgcattacttcccaacagcggttccagcaatgactgagcctgttgcaattcctccacctgaatgccgcttttaaagaaagtggcagccgccagcagaatcatcgcgctattgatagcccagcccacaatcattgaaaaaagcgtatcaaacaactcgtatttcaacaccttcttgatagaggcgtcatcttttttattgtactcgtggctctgtatcacttccgaatgcaggaacaggttatgcggcattaccaccgcccccagtacgctcataataatcagcatacttcctttcgggaaagccggagtgacccaccccaccgttgcggccggccagtcaatatccaccagaaacaactcataaataaacgacagcccgatcaccgagacgaatgcgataatggaacgctcgatctttttgtaagagttggtgaaaagcataatggagacaaaaagcgttgtcagcacagccccccatataataggaatatccaacaacatttccaatgcaatggcaccgcccaggatttccgccaaagaagtggaaatggaagccagcaccgccgttccgagtataggacgggatacccatttgggagtgtatttagtggccgcttccgagaggcagagcccggtgacaatccccaggtgggcaacattatgttgaagaacgatcagcatgatagtagacagggtgaccacccaaagtaacgaatacccgaattcagaacctgcggcaaaattggaagcccagtttcccggatcaacaaaacccacagtaaccaaaagtcccggtccgatatatttaaagagatccagtccgcccagatatcgcttatgatcttttcgttttaagtcttgaaaaatattcttcatctttgcataatagtttatccagtacaaatatacttataaagtaacgattgacaatccattttagttcaaaataccgacaaattcggaaaagaaccgaaagacatacagaagctttttgccgaacaataaaagaagcccccggcaaaaacaatttgccgaaggcttacaatcaactattaagaacaaaaaaattgtcaatcaatatcccatttcatgcaatgcacggcatagttggtcgggacaagacgtcggtctgccaccgcaacgaaccccttcaagtttctttatcacttcttctaccttcatgcctttcaccaggcgtgaaattccttgaagattaccgttacatcctccccagaaggccacctctttcactacaccgtcttccacgttcagttcgatgttcgtgctgcaagtcccctgagttttataaacatattccatggcctgtttattcttcttctccgccttccggtttcatgttcgtataaacagtctgcacatcgtcaaactcttccagacgttcgatcatcttatccaaagtttcacgttgttccggcgtcacgtctttcaagtcgttcgggatataagtaaagtctccaccgacatcttcgaatccgcattcttccagatgtttctggatagcggcatagcttttcggatctccgtagatcgtgattgtaccttcctcatcatcctgttcgtactcatcttccacgtcgtagtcaatcaggtcaaggatcaattcttccatatccatgccctccttgattttgaaagtgaacatacacttatggtcgaaaaggaaagccagagaacccatagttccgaggttaccgccgaatttattgaatacggagcgtacatcagccaccgtgcgggttgtattatcagtcagcgtatccacaaaaacagcaattccgtgaggaccgtatccttcgtaagtcatactcttgtagtcgctctggtctttacccaatgcgtttttgatagcacgttcgatattgtctttcggcatattctcacgcttacaagtagcgattaccgaacgcaatgtcgggttattttcaggttccggaccaccagccttcacagcaatggcaatctgtttacccagtcttgtaaatgttttagccatgtggccccaccgtttcaactttgcggcttttctatattcaaatgctcttcccattggtttatatttttagattgaaatttaaagtttatctaagtttagcacccagtttatcttccagattcttcaccagtttcgacataatcttatcaatcatcttgtcgttcagagtctggctttcatcctgaagcaggaagctgactgcatacgatttcttgcccggttccaggttcttgccttcgtatacgtcaaagagttccacttctttcagcaactttttctccgtatcataagcgatcttctcgatttcggcaaactgcacattcttgtcaagcaacaatgccaggtcacgtttcacggccgggaacttggatatttccttgtagctgatcttcaccgaacggatcgctttcatcagctccttccagttcaagtcagcataatatacttcattgtcaatatcaaatgccttcagcagtttcttagtcaccacgccgaacgatgcgagacgcttgcctcccttggtatgtacagaaagtgccgcagcaaaaatgtcatcagtcagattacctacaaccagattgtgcaaatccagtcccaagcgtttcaggatattctccacgtaagctttcagttcatacaccgaactgctctcatccggatgtgcccacgagttaaccaccttcttgccggtcacccataagcccagatgatagtcttccgtataaggagccaacaccttttccggattcttcttgtcggcatcgaaatagtagcagttaccgaattcaaagaatttcagatccgcattcttgcggttggcattatgcgcaatgctttccagtccgccgaacaacaaagtctggcgcatacagttcaagtccgcactcaacggattcagcaacatcaccaggcggttggacggataagcttccagtccgtcataataagcggcgcgagtcagcgagttattcaatatttcattgaatccgcaacccacgagttgctctgcaaccagattctgcaatttatttgatttatcattttctccttttgtagtcaggctcgacttcagcgtagacggaatttccacattattatatccgtagatgcggagaatatcttcgattacgtcacaatcacgctgcacgtccacacgataaggaggaaccgacaatgtcagcccttcggcagtttcgttggtgatcttcatttcgaggctggttacaatactcttgattgtttccaccggaatcactttacctaccagtgaatgcaccttcccgtaattcagttccactacgaaatccttcgcaggagcagtaaacacatctttaatttcagaagagatcgtgcctcctgccaattctttcaccatgatagcagccagtttcaggcagtatatcactccgttcgggtcgataccacgttcgaagcggaaagaagcgtccgtattcagtccgtgacggcgggcagtcttgcgcacccatgtcgggtggaaataggcgctctcgatgaacacatccgtcgtagcttcggtagaaccggaatccagtccgccgaacacaccggcaatgcacatcgcttcttctttattgcagatcatcaggtcgcgttcgttcaacttgcgttccacttcgtccagtgtgacgaacggagtaccctcgggcattgtcttcacaatcacctcgttgccttttatcttgcctgcatcaaagcagtgcaacggctgaccgaaagcatgaacgatataattggtgatatccactacattattaataggacgcacgccgatcagacgcagtttattctgcaaccattcggggctttccttcacggtcactcctttcacggtcacaccggcataatgcgggcaagcctcgctgttctctactgtcacttcaatatccaggtcgtggttttccaccttgaaggcgtctaccgaaggacgttgcagagtagcctgtttgccgttctgaatgagataagcatacaagtcgcgggctacgccatagtgtgagcacgcatcagcacggttgggcgtgatgtccacttcgagcacgtagtcgctcttgatattataataatccttggcgagcgtacccggaacagcttctgccggcaaaacgataatgcctgcatggtccgtaccgataccgatttcatcttcggcacagatcatgccggtagattccaccccacggatttttgattttttgatcgtaaaacattcgtcaccgtcatagagtttcgtacctaaggtagccactactactttttgtccggcagccacattcggggctccgcaaacgatttgtaccggttcgccgtctcccaggttgacagtcgtaatgtgtaaatgatcagagttagggtgttcaacgcaagtcagcacttcgccgattacaagcccttccaaaccgcctttaatggtttgtacttcttccacaccacctgtttccaggccgattgatgtcagcgcagccgccgtttcatcaggcgtcaaatcgaagttgacatactctttcagccagttataagagatattcatataattaattttttattgtttctcaaaaagatttgcaaagttaataagttttttcggttgaccgaaaaggtttgaaagaaaattgagagttatttcaccacagagtaacactgcctgccgcatggtttcccctctttccggaagaaggggtggctgaaagccggggtggtaggtagaaacatggtatattcctttattttaaaaaaaggtaaaatcattatttttcctaccacctccccctacgggtactcctccttccagaaggaggagaaactatgcagaaaacttatctacaatagtaaaaactataaagtaacgactaaaaagtaacaacaaaaaagtaacgactataaagtaacgactaaaaaggcaacggcccgtctcctcctatcggtgtcgcaaacggattccccgactgcggctcaaaatcgggtgccggcggcggagggacagaaccaacactatcgcgattcatcttcgaccccagcataggcccgacagtctcgcccggcatcggaataaccatatcgtcctccggattcgagaaacgggtaaactcacccttaaaccggagcagcacctcgcctaccgcaccgttacgatgcttggcaatcacgatttctgccataccacggaggtcgttaccacgatcgtcctggtaaatcttgtaatattccggacggtgaataaagcacaccatatccgcatcctgttcaatggctcccgattcacgaaggtcactcaactggggacgttttccgtcgataccttcacggctctccactccacgattcaactgtgacagtgcgacgatcggaatattcaactctttcgccaatcctttcaacgaacgagaaatcgtactcacctcttcctgacggctgccgaatgccataccactcgcgttcatcagctgaaggtagtcgataataatgattttcaccccgtgttcacgtaccagacggcgcgcctttgtccggagctcgaaaaccgaaagagaaggagtgtcatccacataaagcggtgcatccagcaggtttttcagtttatagtccaactgctgccattcgtgtccggccaactgcccgctcttaatctttccgctctcgatttcacaaacattcgatatcaaacggttgaccagctggacattactcatttcaagagagaacagtgctaccggattccggaagtccacagcgatattcttggccatggaaagcacgaaagccgtcttacccatggcgggacgggcggcaataataataaggtccgaattctgccagccggaagtcatcttgtccagtttcgtaaaaccactctcaaggccactcaaaccgtcggttcgtgccgcagccttctgaatcagtttgtaggcctcgtcaatgaccggattaatctgcgtgtaatccttcttcatgttctgctgcgagatctcaaacagcttgccttccgcttcctgcatcaagtcgtccacatccagcgtttcatcaaaagccttgctttgaatattacttgtaaacgtaatcagttcgcgtgccagtgacttctgcgcaatgatacgcgcatgatactcaatatgcgccgaagaagccaccttactgctcagctgggtgatatagaaaggacctcccacttcttccagttccccgcgtttactgagctgttctttcaccgtcaggatatccaccggtttctgattgacagccaggtcggttatagcggaatagattaactgatgtcgatgttcataaaaagattcaggacgaaggatctcactcactaacgaataagcgtctttctcaatcatcaaagctcccaatacagcttcttccaactcaggtgcctgcggttggatacgaccataatcattcaccggttgtactttagcagactttgtgttacgggtatttcttttctgttcggccattaggattgtttctgtttttacgatttatcattttacgattcgattggggcggtcttttccgacaggccctctttcaatcgggacgacaaagataaaatataataatgaagaatgaataaggaaaaatgaagattttagtaactttgcccccgaatacataatcgtagcataaaaaatagataacaccatgattactttcccgaatatcaaaataaacctggggctgtccattacggaaaaacgtcctgacggataccataatctggaaactgttttctatcccgtcgctctcgaagacgctttggaaatcagaaccaatcccgaagcccaacagaaattcacgctccaccagcacggaatggaaatagccggcaatccggaaaataatctggtagtaaaagcttatttgttattagacaaggaatttcacctgcctcctgtcgagattcatctgtacaaacatatcccttcaggagccggactgggaggcggttcgtcggatgccgcctttatgttgaagttgctcaatgaacattacaacctccaattgtccgacaaccaactggaggactacgccgctatcctgggagccgactgtgcctttttcatcaaaaacacaccgacttacgccgaaggtatcggaaatatcttctccccgatagagctatccctgaaaggttaccggattatgattgtgaagccggatgttttcgtatccacccgggaagccttcgccaatatccgcccccaccgtcccgaatatccggtcagagaggttatccgtcgtccggtcgcagagtggaaagatacattaatcaatgacttcgaagcgagtgtcttcccgcaataccccgttatcggagaaataaaagaagagctctatcaccagggagcaatctatgcctccatgagcggttcgggttcttccgtattcggcttgttcgccgccggcaccacactgccggagatagattgggggactaatgctttttgttttaaaggtacgctaagcgaatagtccttcaccaacatagactcttttgcaaatcttagaagcccaacattgcagcgggttgtatattcaacacatttgatacaaaaaatactaaatagggttcttcttcaaatttggtggtaaaattaattaggaaaataataatttgatagtttatagtcgatagtattcaacaataatttgatagtcgatagtattctccattctcctccttcgggaaggaggagtccccgtagggggaggtggtaggtgaatgcgtaagtcggttattatcagcattgtgtatccacctaccaccccggctttcagccacccctccttccccgaaggaggggaatggagataccaccgactgattaaattaccaccaaatctgaagaagaaccctaaacagttatggattataaatcaatatggcataaatattttataaaatagaacctactccaaacgaataaacaaaaaaacggtaccacgactcacgtcgtagtaccgtcacaacacaaacacaaaataaaacacgacaaaactactatgcaatctccctgtctataccggggaggtataagtactatccatgtatattcacatactcacaaacagcttcaggtcgacttgcatcaattaaacaaatcgcatgcacgatttgtttctattttgtttatattttcatgtttttacaacaaataattaaatatatcttattgaatacctctttcacgaagtttcaattgccagttccatgcagaacgtaaagtatcttccaaggtttccacggccttccaacccagttcctggtttgcaaaatcagggttagcccaaaccttttcaatatcacctgcacgacgtcctacaatctgataattcagtttaacaccggtagctttttcaaaaccgttaatcaattccagaacagacactccgcgtcccgtgccgatattgaacacttcgactttttctttctgtgtcttctccagaatacgacggatagcgatcacgtgtgccttagccaagtcaacgacattgataaagtcacggatacaagaaccgtcaggagtatcataatcatcgccaaacacgctcagtttctcacggataccgattgcggtctgagtcaggtaaggaatcagattttgaggaacgccattcggaagttcgcccagcaacgcagtaggatgagcaccgatcgggttgaaataacgcagcatgatcgcattgatcggagcaccggaagctaccgtatcacggataatctcttcattgatctgttttgtatttccgtaaggagattccgctttcttgatcggagccttttccgttaccggcaattcatccggctgaccgtatacggtacaagatgaagagaatacgattccttccactccatgtttcggcatcagttcgaggaggttgatcagcgaaaccaggttgttgcgataataaagcaacggcttctctactgactctccaaccgctttgctcgctgcaaagtgaatgatcgccttaattcctttatatttggtaaagatagcatccagacctgcgaaatccaaacaatccagtttttcaaaagcagggcgaatacctgatactttctctatattgtcaacaacgtcggcatttgagttagataaattatcgatgatgattacttcatatccactgttctgtagttctactacggtgtgagaaccaatgtatcccgttccgcccgttactaaaattctttctttcatattctttaataaatggttagtttttcggcttttgtcgtttgagctacaaatttaaggaaataaaatggaaatgcaataatctgccggcattttatttaataaaaggctattaaagtacgaattaatggcagtcaggtattaaaaaaaggattggaaacccatttctgtatatgttatacagcaaggtttccaatcctatattaaattatcaactgtaagtctttacaccacgccggagaatcccatgaatgccatggcgagcaggccggcggtaatcaatgcaatcggtgtgccctgcattcctttcggaactttcaccaggctcatctgttcgcgcaatccggcaaagagaaccagtgccagaccgaaaccgatagcggtggagaatgcatacacaactcctgtcagcaggtcatagtctttctggatcacgaggatagccacacccaggatacaacagttggttgtaatcaacggcaggaacacgcccaacgcctgatacaaggcgggggaaactttcttcaggatgatttccaccatttgcaccagtccggcaatcaccagaatgaaagtaatcgtctgcaagtatcccagtccgaacacatccagcacaaacttctgaatgaggaatgtaacaatggtagcgatagtcaacacgaaagccaccgcggcgctcatccccattgcagtctccactttcttggaaacgcccaggaacgggcagatgcccaggaactgcgacaacacgatgttgtttacaaagattgccgaaataaatatcaatatatattccatattcttttcttatttaatagagttaagctttcttgaaactattaatcaatgcgatgaggtatcccagggcgatgaaagcacccggagccagtacgaacaccaacattccgtattcttccggcaggatagtcaggtcgaagatcttgcctgttcccagaaattcgcggacagcacccagcaaagtcagggcaatggtaaagcccagtcccataccgataccgtcgaacatggatgccagcgcattattctttgcggcaaaagcttcggcacgccccagcacgatacagttcactacgatcaacgggatgaaaaggccgagtgtggcgtacagtcccggcacgtatgcctgcattaccatttggagcaacgtcacgaaagacgcaatcaccacaataaacgaagggatacgcaccatatccggaatcaggtttttaatcagtgagatcaccacgttcgagcagatcagcacgaacatggtggccagtcccatacccatgccgttgatagccgatgaagtagtacccaacgtaggacacataccgagcaggagtacaaacgtaggattctctttgataatcccgttcatcattactttaaagttattcatatctgtctcctttcttaattagcactgatagaatcagtaagttccactttagttgtagcacccgtagcagcatcggcattttcaccggcggccttttgagaagcacccgtagctccgttcacttctccccctccggctttgtaagcctgataagcagcattcacggcattcaggaaagcgcgtgaggtaatcgtagaagcggtaatggcgtccacctgcccgccgtctttgctgaccgtcagtgcggcttcacccggattcatgcccaggatagacttcgtgctttcctcgtgtgacaccgcctgttcacccttggcaggatcgtaagcaccgaaccatttgtcggccttcgaacccagtcccggagtttccgtatgagccagcagggagtagttgtagattttaccttcggcgtcaaagccaaccagcactttcagctcgccgccgaatcccatggacttggcttcaacagccgtgcctaccatattatcaccgttcttagccggataaacaatgaaatcgacattcttcttgccgtctttctcgctgaagatcgtatcgctttccgccaccgggttgttcgtaaattcaggaagaacttttttcagggcttcgttcagcgttttggcgttcgcctcggcgataggccctttcgtcagttcgttcacataagccagcaacgcgacggagacagcagtcactcccgtcagcaccagcaacatatttttcaaagatgattgtaactttttcatttcttcttcgctacctccccaaagcgtttaggtttacaataggtattaatcagcggagtgaatgcattcattatcagaatggcgaacgacataccttcgggataggcgccgaacagacggatcaccactgtcagcagaccgatgcaaacgccataaatcagcatacctttcttgctcatcggagacgtcacatagtcggttgccataaagacagcacccagcatcagaccaccggaaagcagttggagaaccggagacacgtatttttcaggatccgccagatgcatgatgcctgcgaacacgaatacggtaaccaggatagataccggaatatgccatgtgataattttcttccacagcatatacgccaaaccgatcagcagagccagcgcgctcacttcaccgagacatccgccgttttgtccgatcaacaggctcaacgcatccggaatctggcttaaagcgtccgtattgccgtagatcgcctgcttcatcaatgccagcggagtagctcccgtcgtagcgtccgtgtaggcggtcaactgaccgactaccggccaactggtcatctgcaccgggaaagaaagcaacaggaacacacgtcctgccaatgccgggttgaaagggttgcagcccaatccgccgaaagacatctttcccacaccgatagcaaacagtgcgccgagaatgatgatccatacaggcaggttggaaggtaaattgaatgccagcaacacacctgtgatgatagcagagccgtcacagattgtcgtggtaggtttcttcagtaaatatttcccgattgcccattcgaagaacaaacaagcggccacggaagtagccgtgacaatcagggcacccagtccgaagaagtagagagacaccagaaaagccggaatcagtgcaatcagcacgccgtacatatttttctgtacgctgtctccgccatgaacgtggggtgatagtgatacgattaatttattttccatattcgttattttttagcttgacgtgcacgaatcatagcgcctaccttgcctttacccagacggcagtagtcaagtaacggacggttggcaggacaagtgaactgacaggaaccgcactcgatacaatccatgattctttctttttccattgtttcaaaatccccgttttcggacaacgctccgagcaagtacggttccagtcccataggacaggcgctcacgcacttcgcgcaacggatacaggtttgtgcttccccgcgcttggcttccttccggttcataatcaggatgccggaactgcccttcgcagtaggaacgtcgatgttcaccaacgccttacccatcatcggaccaccgccgatcacctttcccgtgtcttccggcagaccgccgcaagcgtcgatcaactgcttcatcggcgtaccgatacgggcgaggaagttggacggacgggcaaccgactttccggtcaccgtaatcacgcgctcaaacaacggcttgttcttctgcaccgcttcataaacagcgaaagccgtacctacattctgcacgacagcccccgtagagataggcagcgcaccgcttgccacctgacgtttggtgatcgcgtcaatcagctgcttttcacctccctgcggatatttcaccttcaaaggcaccacttcgatacccgcataactggaagctaccttcgtcatcaactgaattgcatccggcttattattctcgattccgataaacgctttattcactttcacggctttcatcaggatagacacgcctaccatgatttcttccgcgtgttccagcatcagctgatgatcggcagtcagatacggttcacattccaccgcattgataatcacacattccgccttgaaagaaggaggaggacacagttttacctgtgtagggaaacaagcaccgcccagacctacgataccggcatcggcaatcttcttcacaatttcttccgccgaaagatcgcattctttcaccagtgtcttgctgcggtcgattgtttcttcccattcgtcaccttccacatcaatgaaaatagcaggtttcgcataaccgctggcatcgactatcgtatcaatcttcgccactttaccactgaccgaagaatgaattgctgccgaaacaaagccggcaggttcggcaatccgtgtgcctacctttaccacatcccctttcgcaacaaccggtttggcaggtgcgccaatatgctggcccagcagaataaccgctttcgcaggaacttccgccgtaatgataggttgatgtgccgacaatttattttcgtgtggatgaactccaccaattgaaaatgtctttaacatacaattctgtattttattctgttattattctgttactttcggagcctcagccgtttcttttggagtaaccgtttctttcggagcagccggagcttcttccttcggtttgcgcggcgggaagttcaactcgataatggtattctgcggacatacttccacgcacttccggcaagatttacacttgtcaggatcgatgtaagccaagttgttctccagcgtgatagcttcgaacggacacgtcttcacgcactttccgcaaccgatacagctcaccgtgcaagccttgcgtgccacagcgcccttgtctttattcacacaagagacatacacgcggcgcgacttcttgccttgcggacggatttcaatgatcgctttcgggcaagccttcacacaggcgccgcaagcggtgcatttcgcctcgtcgacttccggaagtcccgtttccgggttcatgtggatagcgtcaaactggcaggcagccacacagtcgccacaacccagacagccgtagctacaacccgtctctccgccatacagcgaagcggcaatagcacaactcttagcaccgtcgtattgattaatacgcggacggttggcacacgttccgttacatctcaccactgctaccatcggttcagcctctccggctgccagtccgaggatatcagcaattttagccatgacaggttgtccgcctacggggcagaattttccatccagcgagccggctttgacgcaagcgtcggcaaaaccgctacaacccggatagccacatccaccacaatttgcctggggcaacacttcccctacctgggcaatccgcggatcttcatacacggcaaatttcttggaagccacataaagaatagcggccagcacgagcgctatcgctcccaatgaaatcactgcaatcagaatcaaattcataatgttcttagttatttattggttttatagtaaatgaaaatttttgtttcagtcgcgttttattgagccacaaaatgtagtaataaggcacaaggacagccagagaaagaagtgccgcatacagttcattctctatcagtgccataaaaaggaacaatgtaaatattaaaagaacgaaagggataatgaatgccaaggccaccgcctgcattcccatcgacgtttcgccgaccaccattacgttttcccccacctggtaggaagccgccgcagtatcaattatatctatgattttgtccttgctgtctgccgaggaacagtgtcccttcacgctgcaagccgcgcaagccgatgtctgaacgatcctcaccgacagatgagaaccctgtatgttttccacaatacccagatgctttatagtattattcgtcattttgcaaactcaacattacaaatcgcggcaaatttaatcattatttgtgaactacgaagcattccccgtattttttatgtataatcaaacattatttttttgtgtattcgttatcgcacacgggtattctcgtttccaccctcctcctcctcgcgcttctttctataccagagataccgcagtgtccattcgcgtatcttctccagcagctcctcttctgtcagactgtcacagtagaagttcagaatggattcgtagtaatgcagtttcatatcctccccttttttatattctcatagctggctttccccataccggtttctttgcataagtgagtcattgtcaagtttgcgcatttaagcgattcatcgataaaagtacctagaaggacgtgtttgaagttctttttcatgttcaatatctattagttgttaaaaatacaccttagtatgttatttattttcacattggttctgacatatcagaaccgtctatttttttgtttttcgtagtttcacgtcgtgttttgaaaatcaagcacgttttgaacgaagaaaagtttttgacccgtaaacaacaaagattatgccgaaccagtacagaatgtcatatttcatgccacctatcgctcctgtcaggaacgaacagggacgaatggttactcctcccacgctcctccccttctgcgaagtctccgtggagcaggtcttccaaatgattacctgcaacgagaatctcaaactcctgaccgctcaggtacgcaacgctccggacatgcggactgccaaagcgacactgctgccttacgtgacaccctgcggcaccttcacacgccgcaacagcaagtgtttcgtatccccttccggactggtcgtgatagatgtggacaacctcgactcctacgacgaagccgtcagtatgcgccgtctgctattcgatgatcccttcctctgccccgtgctcacgtatgtcagtccgagcggccggggagtgaaggctttcgtcccttccggaacgctgtatcccgaagacgaagcacaaaatatcacggaaagtatgaacaaagccatgcagtatgtcgaaatggcatacggcccggaacctgacaattctggcagaaatgcctcgaaaggcgtggactgttcgggaaaagacctcgtaagggcctgtttcctcaattacgatccggatgcattatttcgtaacattattaattctcaatctataaaaaaatgaatgaacttgaatcattacgccgcctcacggaggcagtagaaacagccaaggctgacattgcccccacttacatcgaatacgtacacctggcgttcgccattgcaaccgattgcggcgaagagggacgcgactttttccaccgcttgtgccgggtttccgccaaataccaacgcgaacacgccgaacggatattctccaacgcactcactgccaatcatggggatatgcatctgggcacggtgttctatctcgccgaagcggcaggagttaccgtccgcaaagaggaggttgcaaacagccggacaggtacaaaaggtacagcaggtacagcgcaaaaactttccgcacacacgtgcgcgcgtaataaggtatacaatagcgagagtccggagtctgaggaactgttgccgggtagcgaacccaaacagccgctacccacctttccggcagccgactggccggaactcctgcaacgtattatgagttacggaagcaccgacgcacagaacgatgtcatgctattgggagcactgaccgctctgggttcttgcatggaacggtatgtacggtgtccttatggcggtaaactccagtccccctgcatgcaaagtttcattatagctctccctgcttccggaaaaagtgccctgtcatccatacggctgcttgtggatcctatccatgaccagctccgcgccgaatgggccgaagaaataaaagcctacaaaaaagccaaagccgcctacgaagcaatgggcaaagaacgttctaaaatagacgccccgcaaataccggccaacaaaatgttcctcatcgcgggcaacaataccggcaccggcattctgcaaaacatcatggacgccaacggaacaggatttatctgtgagtccgaagcggataccctgtccaccgccataggatcggattacggacactggagcgacaccctgcgcaaagcattcgaccacgaccgtttgtcttacaaccgccgtaccgaccaggaataccgggaaattaaaaaaagctacctctccgtcctgctttccggaactccggcgcaggtaaaagccctcatcccttcggcggaaaacgggcttttctcccgccaactgttctactatatgcccggtatctggcagtgggtaagccagtttacgacaggagacatagacatagaagagatattcaccaccataggattggattggaaaaagaaactggacttactgaaggcacacggtccccacacactccggctcaccgacgagcagaaacaagaatttgacactctattctctgcccttttcacccgttcgggtatagccaacgggaatgagatgtatagtttcgtggcccgtctgggtgtcaacacatgccgtatcatggcggaagtggctgtattgcgtgcgctcgaaagcgcacagccctatcaactcaaggcatcttcgacccctctcctgactccggacaaggagattcccgatgacaatatcaaagacggcatcatcacccgctgggatgtcaagatcactccgaatgatttcaaagcggtgctccaacttgccgagcccctctactgccatgccatgcatatactttctttccttcctcccacagaaatcagtcgccgggcaaacgtcgagcgtgattttttcttcatgaaactgggaaccacgtttacccgcaaacaggtacgagagcaggcagctgtcatgggtattaaggagaacaccgcgctcatctggctgaaacgtctggtagactacggagatctggttcacgtagacggcaaaggaaactatatgattgctcgcgcgcgtgtgcgtgcgtaagagagcccccggaaaagtgtacctgctgtacccgaaaccacagtagtgtgtgttgtaagacgttgtatcttgtaagacgtaaagcatagctttagagtacgtaaagctatgctttagctgtcttaaagcggtgcttttgttatcctaaagcgaatccctctaaggttctcccaatgcatccacaatcactctcacctccaatggtgtataagaacggtgttcgggttggtagcccagatcatacaggcgttgctgaagtccgggacaccgttcgatccatttcttcatctttcgatatgcggcaatatcggtcagttcaggagaataaagttgcgccagttccatgcgtccataagcacgtatcgtgaattctttcataatggataagttttaaattattagctacaaatgtaacaaaaagccttcacatttcctacgcttttccgttgaataaccgaccgttactgcccttaaccgacaacaaccgtatacaattgtatacaactgattttccgggattacggggtgttatctttgtatcgtcggaagggaaacagctccccacgacaatatgtttaaccctttaatttatagtgttatgattcgttacaaaatctatcagaaccagcagaagaaaggtgtgaatgcgggcaagtggttcgcccgtgcggtaagcgacgagacattcgatctggccaagctcgccgaacacatgtcgaaacacaattcaccgtattcgagtggtgtcatcaaaggtgtactcaccgacatggtggactgtatcaaggaattgctgctcgacggcaagagtgtgaaaattgacgatctcgccattttcggtgtgggaatccgcagtaaggcagccgaaacgctggaggatttttcgttggagaagaatatcaccggtatgcgcctcaaagcacgtgccaccggtaacctctcgactaccaacctgaaactcgacagccaactgaagcagcaagcggagtatcagaagccgactaccgaaggaggtggttccggtaatacgccgaatcccaacccgggcggcggtggagtgactcctgatccgtcagtctaatttcttaaccttaaaaaaataaattatgagcaattcatcgtcacgccgctccgtatggagcctggttctcaaaattatcattactgtcgccaccgccatagggggtgtgctcggagtgcaaagctgtatgtaagctgatgagaactatcacactgattatcattcattgcagtgccacgccggaggggaaatccctttcggcggaagcctgccgactggaccacatcctccaccggggattccgcgacatcggctatcatttctacattacacgcgacggagagatccaccgtggccgtcctctcgaaaaggtcggggcacactgccgtaaccacaactcccactcgataggtatctgctacgaaggaggactggatgctgactgttgcccgaaggatactcgaacgcttgaacaacggggttccctgctggctctattacgcgaactgcgcaggcagtttccgaaagcattgatcgtggggcaccatgatttgaatccgatgaaggaatgcccgtgctttagctgcacaaaggagtattctaatatataaacagctacgggaggcagtgtaatactgtctcccgtagctgttttatttataaaaatatcaactatcttcacagaccgttgatatcgtgggaaattaacaccggataccccccggtgccggggttatagaccggaaaggtaccgtcgtactctttccaatctatgtaatgtaggagaatcatgcgttaacatgaaactagggacctacattctcttcatctcacatacaaacactctaagtgctaattacatctcaacattttattttataccactaaaatatttatattctcttgtatcataataatatcggaacacaatccccccaataaataagattccatagatagatctattttttatttcacattaacaatataaaaataggtttatacacagtaaaaaataactcaattatttattatataagagtaggaactaaatagctaatatacaagcatgttatgccacaactattcaaaaggatctttgtaatatcctaacaattgttttacaaaataatagaaaaaacgaatatcatctataaaataacgcctaaaaagacgcttaggttcttttaggaagcgatagaaccattccattgctattttctggaacaaaacaggagcacgtttaatattaccagcttcaaagtcaatggttgctccaagagccataaaaagttttatattaaacatttggttatgatatttcgctatccatttttcttgttttggagcacccactcctactaataatacagttgcaccagaagcatttattatgtcaatcaattcacagcattccttttcgtccttttcaaaaccaaaagttggagagtgagcaccgacaacaatttgtctccctaccttcatatttatattttccattgctttactagcaactccttcagcagcacctaataaaaatattcggcaatcagggtcatttgcatgataattgtaaaatgcaggaaagaaacttgacccaggaattgcttcaggtagcgaatgttttagtaatttagataaccaatataaaatctgactatcggacactacccaatctgcttgtcgataaatattataaaattcccgatcatgctgaagctttactaagtgatcaatattgggagtataaaaaactccttcattcaactcatgcaaaagtttattttgtgtaagagcaagaatatcaatattcaaaaaacggattttattccctgttaccatctctatcctaatctttcttttactttcaaatgatccttattcatttttatttaataataaatacgtttatatctcttttattttatttatcaatgcctgtgagatcttacgagattcatatttatcaacatatcttattgcttctaatctcattgtatttcgttgtttctctgtgagtttataaaaatcaacaatcctttctgctaactcatgactattccctggctcaaataagaaacctgttattccctcctttatatattcaggcaaacaacctatatcagaaccaattacaggacatccacaagccatagcttctatcccgacaagccctaaactttcataaagcatagtaggaaatatcattatatcagcttgattatataattcactcaactctcgatgtgttttaggaccaagataatagcagcaatctgataaatctaaatcattaatcttttcatttaacatctccgcctgctctccataaccaacaaataaaactcttttccccgcaaagtctccactcaatcttaattctaaaatagcatctataagaacattccatccttttcctgtatctattcttgacacataaacaattgtacttgttgaacttatatgactatttaaacaagtaaaaatgttcttgtcaacacctcctgatgcactcacaaataattgactcaaggaaatacccggaattttattcaaaacaacattcttaaaatagtccgaaggtactactattaaattcgaattaacaagcagtggaattgcaaaatttaatagcttctttgatgttttatcaattgtgacgatatccccaccatggatattcataaccaatttaaattttctaaagtacctacagattcgtaatgctggagcagaatgtgttatctgatgattatagataaaatcatatttcgtaaaaagtgctttatagattatagtaatataaaaaatactgtacttacaaactttaacgattaagttattagagcgccctcgaataaaacaacaattaaaaatgatatcatttgcattatgctctataccctctttaaacatctttacgaatgttccgtatgttttatcctttttagaagggtacatgtttgagattaataaaattttcatcttttcttaaataacgatgccaattttacatatatcatagctatataataattagatagtttcaacaatattttaaatggaaatggaagctctacaaaatattttctatccatttctcctatcttctcacgtgccaaacaataatgttctttatacccaaatctgcaacacttcaccatatcacgaacataaatttctgctttagaaaaattcaacgcatctatatactcaatatctttattttgaaaaaaagattctaaaaggttcacagagagcatcacctgttctgcaagtttaggagaatatgtagccgtatatgaatttatattcgtacagttataatggtataatgcatcgtttatgctatatactttttgagcataaaaagttaaccttggcatctgttgataatcttcagcattattgattccttcaataggctgaattgcattatcaacatacagacatagtcgtataagtcttgcccaaacactgactggtaccttttttctcaatagctgtaaagtcatctctttaggagtagtatatatgggagaaaacattgtataagttttccctttaggtagatgaacaactgtattacatgtaacaatgtctgcatcgttttttcgttgtgcgttaataagtttttctgtcatatccaactctacaaaatcatcagaatctacccatattacaaactccccagacatcatacttacagccttgtttcttactgctgataaaccaatattgacagattctcttattattttaacctgctggatcctgtcaggataatcctctaaagtagttttaagtatctcaatactatggtcaggtgaattatcatcaataaacacatattctatattagtataagtttgttcaaacaaacttcgtgcacaacgttcaatataggactcaacattatatattggtacaccgatagatactaatggattcataaccaattctattataatgaaagccaagaagttggaaatatatcaggaatctcatttccaatccacttctttggcttaataactaactcttttttatttcccaacattgctccccaaaaactgaatgtactgttagctataatattagctgtacataaggacattaaatacatatctaaataactatcttttttcttattccaatctatataataagcattcggtatattcaggttcaccttaacccatggaatatcatctgagaacacaaaaaacacaggagcttgatacttctctttcattacatttatagccgcttcgtaatattggggcgtacaggactgcaaaaacaagtccttacgacaactatcgcaatagtcgcctcttcttatatgcactgctaccgagttagtattttgtatcaaagaaactatatgattattcttctcatttagaactacctctctgaatctcaatttatctatattatttttaaagtattctctattgtgccaataaccgtcaagataaaccttccaaggtaaaaattgatcccttcctatatatcttttcatacccatttttcccaatgccctaatagaaaaagcagaaacatcactgatgacagtatgagacggaagtcgaatatcaaacactctatcgacctcaaggccattatgcttattcaaaatctttctgttgtaatatccataaatactctgattaggataattatctcgaagatataagtaaaataaatattgaaaaatctgatttccaagccctggagtaaacaagataattttcataagcaaattctatatatataaagcatctaaatcacataattacataacctgttctccgccccatttacaactctcattcttggactaaacactaatgcattcatcagtgcaaatggaatccccataagtccagaaaacaaaagatgacctgcgaaacatgatgctacaagtataaaaacatccattccaaaaacaaacttggcgtattgacttttttttcggtaccgaaaagcctttactgcaagagaaagataaaatgagtaaacaatgattactccaacaattccatagtttagtaatgtatccgcatgatccatttctacagttctagctccccccatcccaaataatttaattccaatattccctccctcccattctagtttctcttcttcccaaaaaatatcacgtgaagagtatagggcatttacaccatctttttcaaagaaatatatccaacgttcaattgctccactataatcaagcaataaatagccatagtaaaatactaaacatattacagataataaaactagaaactttatttttgacatttttagaaaggaatgaaaaataccatatctcatatgtacaaatgggacaagaatcaaactgattaaaacaagaaatatccccgctttagtagtaactaacagagccgcgattaaaaaaaatacattgacaacaaaaatagtaattttcttcgaagtatatctattataaataaaatagtaagaaacaccatataagacggcttgcatgccagacatttcattatgagcgtatataaaccccttacaccctacaccctcgccataagcataatatcctattcccaataatccactatagatattcaacaaaagtacaatagaattaatataaaatattaattctatacctctttcttttatcctttcggatttaaacaccacaaccgcagcataatatataaagacaacatttacaaatttcaataaatgatttatagtaggacctatttgagaatctgtattaagaatgacaagtattaaaaaagccggaagataaattatagtaaaaaacaacaaccacttaaatttaggtaatgaacacaaaattttaaaggcaatcaacaaaacaaatgctttaaaaattataccaatggaagattccattcctttattaaggaaaaatccatttatagtatccactatcactaaaaacaacaatggctttacgagtaacttactgtcacattttatactcattatccgttcaaatcactttatggtctcaagaaagactgaacttcttttcgacaatattacatatccaatcactcattttaatgaaaacagtatctaataaacatctccttattgactcaataataagagaagataaacatatgacaaagaaaaaaatcagcaatatgaaataatccaaatttttccctccataaaatctaataaaaggaagcatactagaggatataacatataaggagaaacaataagtggaaactctgtttactatagaagatgagaatggagatatttttctaaaataactgaatataagaatagcaagaaacaattgagttaacgaacaatctcgtgcaaatggcaaataatgccattccgctacgaaatgaatgcgctcgttaataaaaaccataaaattattcaatataaaagtaacagctagcataacaatagaatacaataatgctcttttagctgttattttatccagccagttcacaccataaactccaatatatcgtcctatgagatagaccagaaacatattatataccccctttccactatcattaacaacaccaagttgaataaccgtaggagataacacataaaagaatagtaaaattccaatcaaaatcttaaattcctttttattcaaaaaattaactaatagatgaatatatggagatacaaaaaaaataattacgtacgctgtataaaaccaatattttgaagttaacaaaggaaacacagattttaccatttctttcatgcaaactccaccaatcaagctatattgcataaaactgaataaaatactatagaatataaccatcatttcaaattgaacaatttttctcacattaaaacgaattccataataacctgatatcaacataaaaattgttactgcacaattacataaagagttgacaaaaatgacaaactctttatcgaaaagattatcacaataatcccaccaaatacctactagatgcatgaaaacaatcattaatatacaaagaatacgaagtagttctatagttgagtttctttgtttttctagtactttcttcataaattatcacatacttattaagccatgacagtagaaactattttacgcaatttttttttcatccactctggtaacaatgctttaatctctgccttgaaatcaggaggatatgccaaaactattccaaaaaatgtttccaaatctttttcatctaaaagcttatatacactatttctcatatcaggtcttggggtaggagcgaccaaattaccttgaaatttcattacattattcagtaatacatctttcacagaaaacatactatcaagtataggtataagtgacattgctttgggagtattcagagttagacaagacacccccttctttgaaaaaaactcaggaattattgattctataccccaaaagtcaccaattgtcacatcacctacacgttctggtctactatataaacatcgataacaacattcacgatatgtatctcctttaagaaaatgataataataagggtctatagtacaactttttacccttacctttgtctttgtttttatcttacaattcagtccccaccctgcactcttatcacgaaaattataatcagttattggttctccatatttaagctcaagccaatggatataacttttaaatagtttaatactaggaaccccgtgacatatcaagtcaatggtcaataaattagttttgtcaatattccccagaaaagaattcaatccagcaatttgacatggtgttccactatacaatactttaatcccctgccttaaaagagaacgaacctctgaataagtctgaagtgtatcactttggacatattttgaactctgaagtgaaacaagatcatccaaatttctaacaactttatgccccacattccaatcattataataagatgctcctacacatactccattatgttctaaaaaatatcttgctagtgctacaaatgctcctcccgaggcactttgataaagttctttatcatttctatactttacagcaaacaccttttgaggtagtgggttaacttgtaaattattctgcggacaatatttttgacacattccacaatctatacatctagaagaatcaataaatgtttcaagaaaaccttctgatgaaaacgtcattgaaatacaagattttggacatacttgttcacacgttctacatcctgtacaaaattcggttatgtgttccattattcaatagctttatgaagaaaatcgtcccctattcttctgtatttctctaaaatagcattaacttcttcccaatcaataggattagaatcaataaccgaccaatctttagaatctgtaacatgcaaacgctcaagattagtgagcttcaatatatcatctatacgaccaaaataatcacttggataaatacaaataggagttgtattgagattaagactaaaagctgtagcgtgaaaagaatctgttatcacataatcagcaaaagcaatgtacgatggaaactgaaatggctctggcaacaataacaattttccgcttttaaatatctgatgaacattagcaccaaaacgaactaatttcaagcctttctgtttggcgaataactctgcatattcattaaaccaaggatgcttatttagttgatagactaatacataatgctcttctgaaggttttcgtatatatttatgccaaaaagcagcacttaattgcaatgtaggatctaaaacacgaactgctccagaaacgcctagctcctttagtattttcaccccactttcttcacgtagtgaaatagcagtatatcttagtaaatattcccgtatttcttctttctccgaatcttccaaaaatgttttaccaaaactagctgcgtatgatattttcttaactctattaggacaaaaagttaaaaagtatgattttaaaacccgtccataccaaccactattccaagtctggtcactacctgtacagtaaatatctgcatctatcggtaaattattgaaatcttcctcacaatttaaaacagatcctagaaataaataatcacgacgaaattttccaaaaactctgtcctgacgtctcaaataaaagaaataaaggaacgattttataatctttttgatcaaaccatcatcctgagtaaccatgcaaattctttgccacaagctagcagaagaaatacgtctgtaatcaattatattggtatttaaccccatacccttaaaaatttcctgagttgcaaatgtctgaagaacagagccataattaggtacatcgtgcaaggttaaaattgatatttttttttgaggcagcataataaaaatcagattatatctatacttataatactatattgaacaatctcgccaatttatataaaactaaatcctttaaattatatttcatcgggtaaattatttctggtaatgacattttttcaatcaaataattatatgaatctatcttactaacctcatttgcaatgaggttaaacatattgtattcatccagaacctgatttcttgcagtaaggacagcctctctagacgttgaaaagacatctcgttctataatatctttaatagtattaattgtcccattataatctcttatattaaccttcgtcatgctatcctgctcgaaataatcactgatattaggacatccatagtatataggatgacatcctgctaaatatgaatcagccagtttttccgtccaataatccatacataatccattttcaatagctaatacatatttatacttagataacacttccaatttatcatcaatagggttatatccattaccatatatatcaataagatcaatatgattctttaatattttattagcaaaattcactctatctcgatgtcctcgggtaaactttttatttgatgttatgaaacatactttattcaaccgttgttcttttggttcgtagtatttaaaatcctgataggacatatatgtaccaaaatcatccatagaaacattggttcctattttacaaccagccatccaagcaagagtaggcattagcttttgcatctctcctctcctaatcatcttaggttgacatccaaaaacataaccaaattgctcacgaaaagctttagtatatcgcttcacatacggtggctcccctaaaaaacataatcttttttctttcggacacaatgttgacaattctttttcaagcccccatacaacaagatagtcgtactcctttggttcctcaaaataaaattcacaatttttccagacataccgttttgaatcaggaaactgacgccaaataggaatggaatacgggccgggaataaaaacttttatcataataatattatagtcatttacttgaaaagattaatttctgaaagtatattgtaatagtttcactatacaatatactattcacttatattctccatttattttataacaaatattttttaccacattttttgcatactttttttctgtcattcccataacataaaagtaaacaagagatatgaaaactcccaaaacgcaaattattgtcgtacaaatacttaatatattatcgcctaataaaaaccgtactaacaatccccaagcaactgaaaacaaaaacgttatatatggcttctttatatattcattaaagaatattttaatatttaatctacatactttttttgcaaagtatacagtttttagttcatatattattccccatacagagaatgaaacaacaatatatgccataggagaataccctatataaaataatatgactaatagaagcagagggaatatattaattaaagagctatagaaactatttcctcttattttccccgtagcaccaatacttgtttccaaaggaagtaataagcactcatttaaagatctgagaataccaactaatgtcatgagataagcccattgaggcacatcaacaagccaccataccaataatttatcaagacacactaatgcaggagcagcaaaaattgcaaatatcaaaaaagaatatttacagctatacattgaaacctgaagcatactttctctattattttcaccttcagacttaacaatagcaggattgactgccttaatcatattattcgaaaacgattgtaattgagatatcacttgacttgcaattgatatagcagcattaataactgcaccaaaataatgattcattaataaacctgcaccataatttcctaccatactagtaaactgtgtggatagtttccatgatgcaaaagaggacatctgttttagttttttctttgagaaatatgttaatggtttaaacacacattctgaataatatttatgacaatatatttgcatgactatcataacaacaatggataacaccgccattagaataccgtatacaatcaatttatctcctgacacagatgttgcaatatagatcgcaattattagcttgacaaaagaatctattatacctactattgaatagtacaacatattctcatgagaattaattacagcatcgtatggcactgataatactgtaaccgtaacactaaacaccatagaataataaactacttttgctgcatatagtctttctacaggaacatttattatcttatcgaaaaacaaatatgaaaaagaacaaagtaataaacacgcacaaatagcaatgataaaatgcaatattacactcacattaaacacctgccttttatcctcaagatttccggttccttcagaataactcataaatcgttgagtagtagcagccatagatgcagacaaaaaaccaagcatattcactgctcctccaatcactccaaatacaccataatctactactcctaatgatttcagaactaaacgagtagtataaagtgtgaaaaatatagtaataagcatttttccataaagaaaaaatgtattcttaactattctattgggactactactcattctttaatataaaattaaacatttctagacaaaagcaatcacataatctactaacaaccaatatatcattctaaaatataatctagtgcggaaaattaaaactaatggtattctgcaaacaacataagatttcttataaacgtaatgccaaataactcataatttgtccaatccgagtctcataataatatttataattggttcgtagctttttctctggcaaacgattttgttcatcataaataagcctctcatgctccaatgtttcctcaacagtaaatctaaaaccaataattttagccggattaccaacaacaatactatatggcggaatattctgatcgcgtatgaccgtccctgcgccaattatggcaccacgaccaatatgcgcgcctgacaacaacataacactagctccaatccagacatcctcctctactataatatctttttctaataaattactgttacctgctttaccaaaaacttcacctattttcgattgatgttgccctgttatagcagttaatccttcagcaacaattgaattttcttttattattaatttacccccagtaacatacaaaacactacgataatcaatatatgcattatcatataaaaaaatattttctcttttacccaaaagagtaggaggcaaataatgtgagtttattccacattttcccaaacaatcattacgtgtagaaaaatattcacgattaaggattcttagccctctaatgattgcattccactttcccataattttcttaagcatagacttataatcttttcttcttaaatctttcagaatactccgattcggtcattaaaataacttttgcaggaattttatatcgatcaagtttactattacaaaactgtactatttgtcttttagcttctgataacttcaacggctctttaaaaagaacttttgcaactaccatcatacctgtgataaaattcttttcaccataaacaatacaatctaccaaattcggcatttgaaatagcacagattcaacttcagatggaagaactttctccccaccaacatttattaattctttgctacgaccaactatttttatgtagccatcacttgcttcttccactaaatctcctgttttgaaccagccatcttcagtaaaacgttccattgaagagtttagatatcccataacctgagtcttactacgaatccatagttctcctcttactatttttatttctgtatttgggtcatctatttttaaaaaagtactatctgatgatttacttgtagtttgactaatgccagtttcactcgtaccaaaggtctgaagaaatttaacacgaggaaaaaatgtttttaattttaataagagactatccggcattggttctgtcccataagttatcatacgcaaagaactcatattatagcgcaaattagcctcacttatcaacactaaatttaaaaatgttggtgatgctggaagaatgttaactttatatttttcaattaattctgctacatgttctggttctcgatgttctggaaaaaccattgtaacgcccattgaaagacaattcaacaaagagttaagtccaccgatatgatcgaacattaaaaaaattaaaaaaacaatattcttaccacgtttccctttatatgaatcaactaaattatctagattatggatcattgctttcggtgctcctgtagaaccgctactaaaaagaataagccccgaatgctgctgctcctgaagttttatcacaagaggatggttttctgttttctttattgctttatgcacattaagtttattatcatctatttcgatgcgataatcactatttgctacacgaactcggtcatctatctcttgattaatctttgtagtaattggcacaatgacattccgattttcatacaatgcaaaaaaaagcgcaatagcctgaaaactataatccgaaatcactgatacgatttctccttgatttatctgtttgctaattattatataatagctttcaatttgctctacgagtgcttcgtaagtatattccttccctttgaaaataatagcattcttactaccatcttctttcatcttttcaacaagccaattcattgtgaattatttttatatttaaaacacaccacctaaataaattatttgtcctgttataaattcactctcaggacgaataaaaaaatcaatgacatttttaacatcttcaaaattaccaagtcgtttgatacattgacgattttttaattcttcaatcttattccctggaacatttttgattaaatctgtatcaattggagtaggaccaacagcattcacggttacaccactttcacctatttcagttgcaagtaccctagtcaactgctctatagcagcttttgatgaagaataaaccagttctccttgtaaattaagtgcaacagctactgttgaataatttacaatacgaccatttttctgccttatcataaacttcgcacattcacgagacattaaaaatgtccccatgaaatttgtattaaacaccttctcagctgtagccttaggagttaatagaatatgattcatagaagctattccagcattatttattagtatatcaattcgtttttgttctctgtaaacattacgtacaaaagctatcacggcaggttcatctgagacatcaagacgaatatgatgataattttcatggttaatctcacattcacgacgactacatccatacacaatatcgccctcacttagatacttctcggcaaggaaatgaccaattccctttcgagttccagtaataattataactcgcttcattcttctaaaccaagttgacgagcaataaagctacataatgatccaatagttcgaaaaggacttatacgtccagacatagccgtctcagaagttagtgaaatctctatatcttcatccagaaaggcagtctcaatatctacaacaatattcacaagtcccatagaatcaagaatacgagcactaccaatcagaggtgtatctttatctaattcatttatcaccacaccatttgtatcacaatactctcgaatgacattaattacaatgctattaatttgatttttatccatatttttgaatttatattacaataaaaaacatttatattattctttacacctttctattcggctaaataaattatcatctttccaatatgatcatttaataaaagcatcacaaatttggaataacactatagaaaatatacggattacacatttatatctattttctaatatgcattcttctctccaacaatcacatttgctatagtcttataaataatatataaatcaagtaacaatgtccaatgttccatataccagatatcagactgaacacggccttccatttgggatagttctttcgtttcaccacgaaaaccatgtgtctgcgcccaacctgtcacaccaggtttgataaaatgacgtaccatatatttatcaatcaatcgagcataagtttctgtgtgagccaacatgtgaggacgaggtccaactatagacatctcacctttaaagacattaataaattgtggaagttcatctatattagaacgtcgaaggaaatttccaaatttagtttttcgaggatcatcaactgttgcctgttttttgtctgcttcatcatttactctcatagagcgaaatttatagcatttgaattctctgccattcaatcctgtcctcatttgtttgaagaatacagggccaggagaagtcaattttatgatagttcccacaattagataaataacaggaaaaacagtaaccaaaaaaataccggataacacaatatcaaatagccgtttcaaaaaacgattctctactttacttaaaggttcatatctcaaattcaaaattggcatattaccaatcatactatgccagatacgttggggaaatcccttacaaacattagggacaccatgaaaatacagcaaatgattctcacaatagtttataataggaacattataatgtccctcatccattgccaaagaacagaatacatgttttacagatgtttttccggacataaaatcagcaaaattgtccggattgccaagataacggcattgagaggagaaagtatcattcggggtaacatcaaaataaccaacaacttcataaatggcagctaaagaactttccatttcctcatacaatgtacgcatattatctcctccaccgataaaaacagcatagcttttatgtttacctttcgcacaataatcaatcagcaaacgacggataattatgcggtaaacacttaatacgacaaaaagaataaaaaaatagataataaaaaatagaggagatattatggagattccactaaaagccatgatacacgcccaaaaaaccgaaaagatgataatattcttcaatacacgtaccacaagctggtcagcacgaatcgcccgactattccatgctctaccgcgagacgccgagcatgccaaataacagagacttaatgaagtcatcatccatgaaactctacaggaaaaaggtaaagatacaaatacttcttcccaaaagaaaaggagaaaaaacaaacacaagtttagaataatcaaatctcccaatactgcaataaactctacgactttatttatttgactggttgttgataccatatcacattaaatattgattttaggcacggatttctttgaacctattcagaatatcttctccaaataacttccaagagatagcaatacaaactgataagaaaataaaagctaaaacatatacttttctactggttcccgaaggatataatgggataaccgcaggctctacaacagcaaagacaggcttttcttcctgaactttggctctggccacctgaagttgattagcaacctgactatagacttgataggcaagactcatgtcattttgcaatctttcctgttcagcacgaacactttgcaaaattatattatcatgagaatccatatagtcagcatattttttctgtacttcgtaatattcttgctgacgctctttaaaaagtttctccaaataaagacaatcttctttcgctttggtagtacgataatctataatatattcctgcaatttccttacaacagaatcagctactactgcggcaaccttgggattctgtaaagtcacagaaaccgtagtcatcgaggttggtttatccacagaagctataatctttttcttgagtgattcaatcttttccgattcttttttggataagtcgattacaccctgatgtgtcttttctaaagatgttaattcatcttcgtgaataaacaacgtttttactgcgccaattactatccctggaaaacctatcacatacccccaccagggagaagactcttcatccaaatatgagcttaaagagctttcttcacctcctgatacaggaaccttcatattagaaagttccaacaagaaaggagtagaagaaacaatatcagcagacaaagaagcgttcaaggcatcagtaccttcattcatagaaactccacttcccaaaaaagaagccgccaaaccggataaaccactgcctttagaacctcccatttcaggagaaagagtaattccgactgtatattgtttgggaatacttatcgcaacaatgatacctataaccaagccaataccggcagctttgtaaattgtcttacggatatctataatcttatgaagagtttccgtccaatcaatttcaatctcttcatcattatgattatcctgtttctgctttatgtctttttctgatgtctgttctatcatagcgagttaagatatagtcgttatttctttattaaatttgcaatagaagcaaccatcattcctaaagtactgaatgtagtagcatagcctagaatatttccgatattagttttcttcttcgccttactgggaattataatctcacaaccgggctcaatctgtttcttaccactacccttcaccttagtcacctgaccattcatataaacaatgaacttcttactcttcttcgcattctcagaataacctcccgcctgattcagataatagtctacatccttgcctttcatataagaaacagtattaggaaccatgacggcaccattgattgttaccgtattattattcttcggaatagagactgcatcaccctcacgcaacacaatatctgccgtacttccgggattggccaacgccttctccaaatcaataccgaccgtaaacgtatcctccacacggacacccagggaatcaagcatagcctcacccaactgacggctcatcaaacggattacatcacccatacgtttcttctcactcgcattggctacacgggtaagcttcgcaccacgaagataagcgtagttggtggctccgccggctttgttgatcaagtctgaaagacgttcctccctgctggtcatcgcataggaaccgccgaaaagtatttctccttcgactgaaacattctgttgaggttgataaccgggactgcgacgaacataaacctcatcgtagggctgaaggacaaagccgggacgaccgtcaactacaaaaccgtcctttaaggcaaacgtatacatctgaccgatagtatcattatcaactgtactatacgggttctttattctgcgggatacatcaacacggactacggaagcggcttcacgcagaccgcctgcctggatgatcaagtcctcaagggtcatgttatccgcataaggatacgagtcaggctgagccacttcaccgtggatgaccacattacccctgtcctccaggtcatgaatgctgggaatataaagaatgtcattcttcatcaggggaagattgggggaagtaccctccatgatagacttaatatccagagggattacttcggaagtcaggtcctcacgctgacggtaaaggacggcacggttcaggaacgcatcaccggtaaggccctgggattcgttgaccagttcgcggacggtattcagcctgccgttcagttcgtagataccgggacggtagaccgcaccccggatttcaagcttgttgatgaagcggttaaggatagcttcggccgtcacaacatcgccgttgcgcatcttatagacactgtaatccatgtccttgaccgtgttgacttcatattcctgaccgttctggcggaccacacgcaaagaacgggtgtaggcgtcggcttcaaagccgccggcatagctgataagcgtggaaaggttctcgtccttcttcatctcaaaacgcatcggacgtttcaccttgccgtcgatcttgaccagtacctcataagcgggaactatcacaacgtcaccttcctgaagacggatatcgtcctgaatgttacctttcatgataaactggtagacgtcgattgtagcgatgttcctgccgttacggaccagttggacattgcgcaggctgccgatgtcactcacacctcccgcacggtaaagcgcgtgaaagacagtggcaaaggaggaaagggagtaggtgcccggctggaccacttcacccatgacattgatctggatagtacggatgctgccgagtgtcagacggatgtcagaggtcgggtcgttcgtattattaagaccgttatagatcttgtttaatgtcttcttgagatagtcgttcgcttcagcgatcgtaagtccgttcaggttgacggggcctatcttctggatattgatagtgccgtcgggagagatctgctggcggatagtattctggctcgccccccagatatcgattatcacttcgtcaccggggccaaggcggtaattcaagggggtggcgatattgacactgggttcgaaggtcagattacgggtgttgaagatgttacgtccgaagacctgattaccgcgtgcgaggtcttgggtactagggtggtcctccaacatatccgaggtgttctccttcatctcttcacgaaggcgggattcgttgatatccgtacctgtggcgttggaagcgttcacgttgttctgctgctcatagagctgcttcacacgcagggcctgctccttggttacacccttgcgggctaactcggaggcaagctgtttttgctctttcccttgtctaatcccctctttgacatattccaatacttgagagtcgctcatattttgagcagtcacaggtgtagcgcccaacatcaataatatgaggatgagcgcacccattagtttttgcattttcattgattaatctgaatttttaaattcaatcgaaagtactaaaccggctccacacatcctgccggtatatctacacacgcacatcccaacattgtcagtcggacggcgacttttgatttcccattcatatctaccagttccccttccagtcctgccaatggcccctttattacacgtattttttctcccggcgctaatggcgatgtgctcatacaaatcgtttcgtccgaatagtcgagcataaatttgaatcgtaacatttgttggtcgggaattacagccggagtactctccccacgtagtaccatgtagcggctgatagcggataaggtcagaacttctttttgttcttgtggatcaacgtggacgaagatcatcattggaaggatgactctgtcgacaaccttgcgacggtcactccagttatgaacttcttgttggataggaaggaaattttcaacgcccattttagtgaggcgctcacttgtctttttctcatgatggatacgcacaatggcgactaaccagcgtttagagtgcgctacgcttctgccaatcacatctgttggcagaacatttcgatcgtcatttttgctaatgatcatatttttttaccccactttttccattgctacttaggcaatgaaataattcctgctgcaaagataggcaaaataataaataagaaacaagaaaaaaatgctttcttttttacttaccagccaaaatctatagctagaatatgccgtggggtaattctctaatacttcaccgtccgtatgaagcatgcatcactgtcactgccatcactattatttgatgcaccattctcaaacccttcgaaacccatagtgaaatagtttatatcaaacgcactcgattttttcacatcactaccggtactactcagacggttccgacattgatatatggctcccggacgttcaaacaggtcatagaacagcggaacatactgaatattcccggtaccgtcgttattatagtaatcggtacgttgggcataacgcagtgcacctactttttctccgttacttgtcatccctttacgacgtccataaccggatttaccaatagggaaaaatatattatggctattatttatattgaagacgaaacatccgcgcatacctttcttcgaattggtcggatcttcattatgatcatatcccaatgctacttccactgacttctgtgtctcggttgcaccgtctccataaagaacaccgtaagctttaccaatgttactatgaatcgaagtagattccaaggtataaaaatcttcgattgtagcaatacgttcatgatctcccgcaatggaccaacttgcaaaacgactctttacatcatctgctgaaggtgccagttgcgaccaggtcttttgagagggtgtagtcgctcccagttcaagaacatcgaaactacctgacggccctaaaccaaaagtaaacccgggtctgtcattattggaagcgagaatagctgtacggtttccacgacggaacaatgatccttcttccaaaggtgactttgtataaaccggagcattatttgcatcaaaacgataaacattatatgatgcccatgccgggtttttatcactttccgcattcccgtcaatagtgataggagcataaccttgacgtacataaatatcatgttcgcaagtgtaattgtgatagcgcacacgtacgatagcgcaacggggagtagagttttctgcaattgtacccttaaaatcaatccagaaatctatcggatgctcacctgctccttctatacttttcacacctgtctgttgcgcattgtcacttccacttccttctacagtagaacgcaacgtaatgaaatcgtctcctccctcaacaatagtagcactccatgctccttcggaattgaacggcttaaaatcttcggcatcgtcataaggcagacgcataagcgtcacatgaaaattatcactattacccgcactgcgccatacgcctttcggattctcaatacgacgtacttgtatcatatccaaataagctgtcttgggaacataggtacctgtgacatcgtctttcacctgtatggtaaacttgattctctcttttcggggataggccgaatatggattatttcctgtaaagcctgtttttgtcacaagctctttggcacgggtatataacggaatagtaaaaatatgttcatttccattactttttaccgaatattcaccgtcagccaaatcatcggcgccaatattgctaatcttataacttctgtttcctttatttttttcattataataggtctcgttgtatttcgtattaataggggtctgccatgagggcttgtcttcgtatccgggaactacaatcttcacaagggaggtctttctcaatgacaaaaagctgttccatggaccgtcgttataaatccaccctgaataataaaagtcattaggaactgtcggaaatgcacttgttccatttccccatggtctccaacctgtaaacccggtatcttcatccttgcctaggatttttgcatccaaagtagaattgggctttatttcacccactactttcagggtcacattcattgatttattataaaggtaagagatatattgaggggtgctcacatagatatcggacggttcttcatactcgatatgccagtcggcatcgtttccgtaacctttgaatttaagagtcaacttataatgggtattacgcgttgcattatagtcggtagtaacgtcttgccccaacataaaacggaacttgataggtcccgctcccacatgttcgtttgccgccgtgcaacggtagtatcctgtcacctcaacataggtaccataaggtttctcgtctttccaaccggagccttcttcttgctcatcagggtcgggatagtcgatatctacgccattctgcgactgcttcttagacttaccttttccctgcatattctcgtagaagaaaagcgattgtgccttatgggcatgggtgttcgttataatatcttgttcatctccttcttctcccttacccatatagcgatgcaaatcattgcagatatgtatatagttttcgggcgtaagaacggaaagatctgcaggcaatttctggattttgatcgactttccttccgaatataaaccattggatgcagtatagcgttccgaacgagcatgcatctcaggtttccaatcgggatccttataagaatccggatcaggaacatcttctgaaactaatcccggagtattcggattacccaacgaacaggttttgggaatatctttcagaataacgttttcgatataaatctgcacattggcataaagcccggaaccgtcaaatgccacagtcaccttggacgcggcgcgacgcaaccaactatgaagttgtacgcccggggaattaatggtaacaagatcatccggagcattacggtcgggagtgagactgaacacaccgaacatctcgctattttgggaaatatcatcaggatcccactgaagggagattgctttcaatccttcacgggtagtaattttatccttatactgcgttagatctcccatattggcaacagcatagatataatacttaccccgctttatcggacggagcttgaacattgccgtaccggtcttactatcctcgaactggttaccctgttcgtctttgtcttcatctatccggttatcttccagattataactccaaccacttacatcgggatcaatgacaaggccctcacctttaactatataattatgaactaattttcctgtcgtatcataaaacaacatgcagagtgaatttatattctgaatggcattgccttcatcacctccttcggcacgggtagtccccagtgctgcatcctcctgatcgaaacacagggttaccgaaagggtggcattgccttcgcctatctcttcattcataaagtaatcatcccggcaagctgtcggtatgaactgcaacataagcaaaataatacaaaatataatatctttctttctcatacaatatcaattcttagtttcaggtttgagtccgaactccggctcaagaatcacttccgcatagggtactacttgcacttttacttcgtctttttccgtaaaggtgatatcaaccagtacatgtgtgttacgaaatagagcctctagatttggaaaggtcttggtaaacgacagttctttgccattctcggacatgtcgagcttcaaggtgtattcttgttcaccgtatgtagccgatccggctttcagttttttactttccggaaggtaaaataccgggaagaccgctttgccgggttggtcacccgtcatactcggcacttctaatggtccgttaactgtgacttcctgatgagaagtttccgaagggatatcgtaagcttgtatccagcctctcttatctgccagttccacatcatccggtgattgttgagattcatccgctactttcttcagccagtttatccaataaagcgattcatcgtcaaaagacatgaacaacggttcccgtttatgaggaatcagataagtagccccggcaatatcagaaatatgaatagcatctatactgactttactcttacgcttgttcgtgaaacgaaaagcgaacttcgttgcagcacgtaccaaatagaattcacgttctaccagattctctgctttaaccggaacgtcatataccgaactcattggtataggattcttataatcgggaatgaaaacgaaattgtcaacaatgcttgcgaaagtagtgttaccagtcgtcaatgtctccaattgttcgtgaagatcagtagatgcgttctcttcattagctatcagatagattttctttgtttcattccgtgtcactttgaaaatcctgtaacactccgtttggggaatctcaccgaaatcaatatacatattgtgttccacagtaccgttttcatgaagaataacgatacgcagtgtatacatatattcgacaggattatctactgcatcattcaccctatcggatgcacgcgtttgatcaagaagaccggtacgcagaacgagtatggcagtatcgtcgtccggctgtacctcgtccgtataacttacctcccctcccctacaagatgccgacaataaagcccagctgacaagtattgtcatccatacaatatgtcgtagtatttctttcattcctttttcttcttttttcaaaagatgttactcaatctacatctacgttagagagtaccaccctccatgagttgattagtatcacgctatttatccactgattttgctcgtcgagaaagaatgtcatattgtattcatcctgtcggtcgaggtattcctggtcgctcatttttctattgtaattacctttcaccagaagggcataatcgataataggaatagaagctaccagtttcccttcagtggtacgaataatcaacatcggacgcgaatacagactccagtcccgcaagacaagtctgctcaccgtaagttccgccacggcaactttgacaattgttgttacacgactttcttttcctgtcgcaatgtccacaccagcttcacccgaataagtagaccacgcacgataaacgatcggctcgtcttctttcagtgtattgtcatgcgctatccaaccattacggtcttcaatagaaaaagtaaagtcgtcaacatttatatcttgtcccgaaaggtgctgaagcactacacggaacacattcgtatctttcgttagtggcatgacgtatgtataatcacctccgtcgtcattggcaggcaaacttacgtcaagagaaccatgaaacaaaggatgcaggtccttattggaataggaaacaccagtcgctttgtctagataacggttcaatttacagtgcaagtctgtcatccggcaattgtgcgaggcatcggtcactgtaaatgactcaccattatcaagaccacaccatgccataaggtgataatcaccgggagcaagctccagtttcatggtgtaatcaccggatgcaaggatttcaccctgttcgtcagcttgccacaccaactcgccattagagttaaaggcataaagtctgaccgacttcacctcatgggtgaaagcgtcggcaaacttcatgttcatgtcataacgaaatttcagatgataggtcactgaacaatcgccttcatcgtcataaatagcattgtcacacgacaccaacaaaagtaattctacaaggattacccatgctttcatcccaaaatttctgatataagacggtttgtccattctacataattattgttgtaatagtatatagtttacaatacctcattacaggttgtcaccattcaaggtcgatgttctgttttactactcgccatgaaaggatattaatacgtgcacccagatatgtttcgtcattagtaggcttctgcggaacaatcacttcttccggatcaagaaccggcgttccaagaccggataccgaattaatggcaatgtcataaatatgattacgcacaattccatatttaccgtcggtgtcatccactcccgggaaatcgttcagatgcttgatgtcagtataatagtaagcttgtccactcgaccaaacccttgctccgggcatatttgccagaacatcatttacatcgtcaagattggcgtatgctgtatgatcggctttataaaaagtatcggttacgcctttcttcaattgaaggtagcttaaatatctgccactattttctgactcgttatcggcattgcctgactttatgccggaaacgagctctactttgtctttggtaatcggagtatagatttctttagcatctgctgttcctgcaccctctattgttttagtataaatctgatcctgcacaacactcaacattgctgtcatcgcattatcttttgtgtagtccgtaccaccccacttagccagatcaatgggatgagcaacgttactatcatcaatagtcactaatacggcagcaataattgcttgggtacggttacttacctccgtcgccggattataggaactcttcttaccggtctcatacttatctgcagcattttcctgacaatataagtttgtaccattatatgatttagagctgttgtcgcttgcgccttgagtacctactttacctgcaatctgatcatacggtaaataatcaaatgtgagaccgtcaggattcattgcccaatatgaacgatgatattcaggatgattccaactccaaaccggtgtgaacgcccaagcggaattaactttcttaaagaggtatgactgagaagcagtagatgtcacttcccaacctgtgaagattacatatacatctttactgtcaacttgaataaattcggaaccgtccttactcttttttaatttcacggcagtatattttttatcattatcgccataggttacatcatttttaagagtcatatccttccaatcggtatataaccgtactttagctaaaacacgctctacatacacatttaccggagatttttttgcttcatcttcagtctttttgagagcactcgccggtatgttcacttcacaacagaaattatccgaaccaaacacagaacttgtcatcaagaactttgagtcctttacataactatatgaaccaaactttcctcgaagtgtagcaaggtccatgctagccgtacccagtgctattttctcatgattaatcacagcgaccatagatttaagttggtctaagttgtcgccctccctggtattgataacaattaccgcattcaactttttctcaatattaggcatatcctgtccggcagactcagtttcgtcctttttacagtcatagtaattcgtaccgtcgcttttaactggacaaggactaccattctccttgaaaaaataaaaacgaaccgattctacatcattttcaacactttccccttcttcataaagatctccggactgatcacctgccgctcgcgtcctaaagccagtagtattcgtaatatcgacagacataaaacgagcgtcaacattagtttcagagagatcattctcagtcatgtcactgttggaacaagcactaagaaccattattcctaacaagttccaaaataaatttgataacttcatataagtatatattaatggattaataaattatttatctattttatctatctcaagcaaaatgatttcagcctgttgcactcctttgttcttcgcctcattcaactgcttgcgtgcaacggtgtaatcttcaacaagaaaagcataaactccacgagcatatagtgcctcgggtgaatctccccctttctggagataacgctttgcattttcaacgtctttacgctgcattgctgagtttgccgcattcagattggctatctcatcgttaggatacatccttacagctgtttcaaacacatcattgaactcaacgctccctggctcgtaagtctgagccacaagataaaactcattgagactgagtttttgaggctgtgtctgcatgatacgttttatctcttctacgtcactaaaactacggatagtatagtcaatacgataatctgtgtgacgcaatgcaggataacaattctgcaatagaaaacgatattcttcaggataagtccgtttaatttttgcttctttcgcgtcagggtctaaacgactgtcaatcatgcccagtatctccgaacgatgcacaagattggatttttcgacatattgacgcaatcctttccaatcttccggttcatactctgtaacaatcacactgtcattaaaatgatatagttgcttgatatgattctttaatgcagctgtacgacctatcgccagatcccgattatgagaatatggactttcgggagaagcgtaacctttgagccatacggaagttatgactacatccttgtcattacggactgaatcaatagaggcctgtattttaccgagttcgtatgtattccgccgatactcaggatatatcactgtcttatcaaccggaaaatcgatgaaagcagaaccggaaagtgaacgatgcttaacagtttctgcctgcggatgaatataaagtaactgtggactgaaaggaagcgcttcaacgtatgagcccaatggatcgttccattccgctaatagtgtattacaacaaccgtaatcactgcgatacaactccaatgaggcaccattcatccatttataatagggtactattgcatgatatactacactttcaggtttcgaacgtgctttaaaagacatttcatctttgccggatagcatactctcaccattccgtacataataataataacgctgacgcccataaacgcctactgaaggaagttccaaggtatctactgtactgataaaacgaggagtgagcaatacggctctattgctttccacatccagacgtgatagattcatattcatatcaactaccatatattcaccgtttcgttcaatcttcagattgtcggctatcactccggttgtttgttgggcattcagcatacaacttgttccaaataaggctgttataattaggtaagttcgtttcatagcatactcttttagaataaatagactaaattcaccgctgctttagtgggaccaaagtagttgtgtggtttgttcttctctatcttctttccacacccggcacatttaaatcggtcataacgggtataagaatagccgactcctatctctgtttcgaaattccagtgccgccctaatatccaggtataaccgtaagcaatacctccacctagaaaccaaccttgatacctagtgtctttaagagtagaaaaatcagtaccaagcaatttgaaattaatatcaataccgcctaaattatactgcccgccatgaacatggattccgataaaatggcctgcaaaccggtcacagaaccaataacgagcttcaggttgcaccgcccaatgtttccaccgacgactatgcgataaagtccatgcgttgagtcctccactaacgtccaacgtccaacgcggagcaagccctacctcgatgcctgcatttatattcataaaagcatcagatagaatattagtctttaacgctacatcctgcgcatttactgtatgaaccacacttatcgtggtcattatcagaagaaaaatccctcgtttcattatttgtgtgtattcttgttctttataattattgtaatttcaccttaaataactagtcaaacagacataataaaaataaattttatcagtaacaaaaaaaatacagttagtgaaactgtattttctctttttaatatatttatactgatcgtttgtttgataggttattgggatacttctcttatcaagaaaagtattagacgatgcaaagttataaaaaatgggatatatgatattatattcaataagaaattatgctttataacaaaaaaaattagcttcttttattaaatgttaagccgcttatcataacaatacaatatcgatatcttaaaaaaaacaaacttagcttatactacttacgtataaattatatttaaataaaatgatagcaatatagcaaatagagaaataaaaaagctgaataacttttatagttagacagcctttcgttattttttaactagctttttcaagaatacaacctaccacttataattaataccgaaacttagcaattctttcaactggaagaagctgtcgccttcagtcggcttggagctatcgtcaaaacgagtatgcacataaagttttgtggacaaataacggttcaaaataaagttgaaagtattttcccattccacacgtgcccaatgataattggtcagatagttgagacgggattccaatgtaacggcagtgataatattccaattgaatgtcgattgcaattgagaaccgaaatcattctttgaacatttgcctttttccaagccgaatttagtttcatctacttctgaattaccgatgtaacgcaagttataggtcaatggagccataaacacggaaaggttgaatttcttcttgttcagtttatagtccataccgatactgactgctaaatctgccggagacatgaaagcagaaaccaaatcttcactattggccttgtatccatggcaaaactgagtcttgaactctgaagaaatcgtataataccaatttttaagtgctcttaaacctaacttattatataagcggagttggtcggtattaaagaggtatttatggtattcatccgacggagtggaagtcatgcccaacttagcttcaagctgattctcgaacaagatcttctcgttgtcgttgtaatttgcaaatatctgaaaagtagctaatccggagaagttactttctcctcccttataccagttgtccgaaaggtggttctggctgatctgcaacgatccgttaccaccggtcacccaccagttaggcttgctgatcttaatatcggccttccctacattatcactcatctcctcacgctgaaacaaatgaataacgtttgctttcggggatattttcggcttcacatcccgacggaaaacatcacggctcatgatccggtcctccgtagtaacaaccaattccggacgtttcagataaagatccattaatgcgttgttgaccagtatattggctcgtttggttttagtaaataccagcgtatcataaggcaaaagctctgccgttagattcggagtagtatccaattgtatcggcttccagtctattgtagaatattgcttcatcggagcataataatatgccaatggagtaaacaggcgaaaataatcggggtcggaaggaatataacgtgccggcacagaaggatcattcagataatccaactgagcaatatacttattatataaataggaaactgtatccaacttaggagtcggtcccgacatattgagtttcagcatcaaatatttctgaagctccgttgaaagcgtatccgatcgcaccaccttggctttcgccaccactgttgaagactttgttaccttcttggaaggcttgacagcctgtacaggagcaatctgtactgaatcggtcggaattatggaatcttgaacggactcctgtgcagaaagcggcaacatgaataacagctgagtaaaagctgaaaataaaataataactctcttcatatttgtctatggtttaggatgcaaagctacattattttgtttagaaatcataggattctttcaaaattgcattttttaataaaattgtagccgcgaaagtctgcaatcttcctcttttttttataattttgcgctttttaagttcgtaagaatttgactaagtaaacaattattaaaacagttatagctgtgggagaaacaaagtatattttcgtcaccggtggtgttgcctcttcattaggaaaaggtatcatctcatcctccatcggtaagttgctacaagcaagaggttataatgtaaccattcagaagtttgacccgtatatcaacatcgacccgggaacattgaatccttatgagcacggagagtgctatgtaaccgtagacggacacgaagccgacctcgacctgggacactacgaaagattcctaggcatacaaacgacaaaggcgaacaacattactacgggacgcatctacaagagcgtcattgataaagaacgtcgtggtgattatttgggtaaaaccattcaggtgattcctcatatcacagatgagatcaaacggaacgtaaagttgctcggcaacaaatacaagttcgattttgtaattactgaaatcggcggtacggtaggcgacatcgagtcactcccctacctcgaaagcatccgtcagttgaaatgggaactaggcaagaacgctctttgcgtacacctgacttatgttccttatcttgccgctgccggagaactgaaaactaaaccgacacaacactcggttaaagaacttcagagcgtaggtatccaaccggatatactggtattgcgtgccgaacatccattgagtgacggactgcgtaagaaagtagcacaattctgtaatgtagacgacaaagccgtagtgcagtctattgacgcggaaactatctatgaagttcctatcctgatgcaggcacagggactggacagcaccattcttgaaaaaatgggattgccggtaggtgaaactccgggactcggtccatggcgtaaattccttgaacgccggcatgctgcagaaacaaaagaaccgatcaatatcgctttggttggaaaatacgacttgcaggatgcttacaagtcaatccgtgaggcattgtcacaggctggtacttacaacgaccgtaaagtagaagtacatttcgttaacagtgaaaaactgactgacgaaaatgtaggcgaagcactgaaaggtatggcgggggtgatgatcggtccgggattcggtcaacgtggtatcgacggcaagtttgttgctatcaaatatacgcgtacacatgatattccaactttcggtatttgtctgggcatgcaatgtatcgctatcgagtttgcccgtaacgtactgggatttgctgatgccaactcacgtgaaatggatgaaaagactccgcataacgtgattgacatcatggaagaacagaaggcaattaccaacatgggcggtacgatgcgtctgggtgcttacgaatgtgtattgcagaaaggttcgaaagtttttgaagcttatggacaagaacatattcaggagcgccaccgtcaccgttacgagttcaacaacgactacaaagcacaatacgaagccgccggcatgaaatgcactggtatcaatccggaatcggatctagtggaaatcgtagagattccggctttgaagtggtatgtcggtactcagtttcatccggaatacagcagtacggtattgaaccctcatccgttgttcgtggcgtttgtgaaagctgctatcgaaaacgaaaagtaatttataatttgtaattaaaataagaatggataaaaataccattacaggtctcgttttaataggtatattattggtaggattcagttttctgagccgtccgagcgaggagcagattgctgcacagaagaaatactacgattccattgccttggtacaacagcaagaggaagcgctgaaagcgaaaacggaagccgcattggccaacaacaagaaagaagctgcaacaacagccgattcttccgccttgttcttcaacgccatgcacggaactgattctaaaatcagcatccagaacaatgtagcggaaatcacttttgcaacaaaaggcggacgtgtatattcagctacactgaaagagtacatggcacaggataaaaagacaccgattgtactgttcgacggtgatgatgcttcgatgaacttcaacttctataacaaggaaggggcgatccaggcaaaggattacttctttgaagcagtgaacaagacggacagcagcgtgactatgcgtctggctgcggatagcgcaagctacatcgatttcatctatacactgaaaccggacagctacctgatgaactttgaaatcaaagcgacaggtatggcagacaaattggccagcactaactatgtagatattgactggtcccaacgtgcccgccaactggaaaaaggtttcacttatgagaaccgtctgtctgagttgacttataaagtaacgggagatgatgtagataacttgtcggctgccaaagatgatagtcaggagctgcaaggacacatcgactgggtagcttttaagaatcagttcttctcttctgtattcatcgccgaacaggacttcgataaggtttccgtaaaatcaagaatggaacagcaaggcagcggatatatcaaagattattccgctgaaatgaataccttctttgatcctagcggaaaagaaccgacagagatgcacttctatttcggtccaaaccactttaagacactgaaagcgttggataaaggccgtactgagaaatgggagcttcacagactggtatatctgggctggccgttgattcgctggattaatcagtttatcacaatcaacgtattcgactggttatccggttggggcttgagcatgggtatcgtactgttgattctgactatcatggtaaaagtcgtggtttaccccgctacctggaaaacgtatatgtcatctgcgaagatgcgtgtactgaaaccgaaaatcgacgaaatcaacaagaagtatccgaagcaggaagatgcaatgaagaagcaacaggaagtcatgggactctacagtcagtatggtgtgagtccaatgggcggctgtctgccgatgttattacagttcccgattttaatggccttgtttatgtttgtaccaagcgctattgaattgcgtcaacaaagtttcttgtgggcagatgacctttctacttatgatgcattcatcacgttcccattccatattccgttcctgggtaaccacctcagcttgttctgcttgctgatgacggtaacaaacatcttgaatacgaagtatacaatgtcgatgcaggacacaggagcacaaccgcaaatggcggcgatgaagtggatgatgtatctgatgccgattatgttcttgtttgtcttgaacgattatccgtcaggcttgaactattactacttcgtatcgacattgattagtgtgggaactatgattcttcttcgcaaaacgaccaatgaaacgaaattgttggctattctggaagcgaataagaaggatccgaaacaaatgaaaaagaccggatttgctgcccgcttggaggcgatgcaaaagcaacaggaacagttgcagcagcaaagacagaataagaaataaggagaatttcctgaatatattctgagaaagccggacacctatttttggttgcccggctttctttctctaataattaatcgtatgaaaactaaatatacttataaacaaatctggactatcgcctaccctattctgattagcctgattatggagcagctcatcggcatgacggatactgcttttctgggacgtgtcggcgagattgaactgggggcatctgccattgccggtgtatactacctcgctatctttatgatggcattcggtttcagtatcggagcacagattttgattgcacgccgtaacggtgaaggtaattacaaagaaatcggtccgatcttctatcaaggtgtctatttcttattgatagtggcagctatactatttacactgtctgttgtattttcaccacatatcctgaagaatatcatttcatccccacatatctataatgcagccgaaagttacatccattggagggtttatggcttctttttctcgtttgtcggtgtgatgttccgcgcattctttgtaggaacgacacagaccaagacgttgacactaaactcgatcgtaatggtgttatcgaatgtggtattcaattatatcctgatcttcggtaaattcgggttcccgcaactgggtattgcaggggctgctatcggttcgtctttatcggaactggtatcggtgattttctttatcatctatacttggaaacggattgactgcaagaagtatgctttgaatatcctgcctaaattccggagtcagacgctgaaacggattctgaatgtttcagtctggactatgattcagaacttcgtctctctgtctacttggtttatgttcttcctttttgtggaacatcttggagaacggtctctggctattgccaatataatccgcaatgtatcggggattccgtttatgattgcaatggcttttgccgctacctgcggttcgctggtcagcaaccttatcggtgcaggcgaacaggattgtgtacggggaactatcaggcagcatatccgcatcgggtatgtatttgtaattccaatattgatctttttctgtctattcccggatctggttctgagtatttacacggatatgcctgatttgcgggaagcgtctattccttctctttgggtgttatgctcggcctatctggttctagtacctgccaacgtctattttcagtcggtatccggtacgggaaacacgcgcacggctttagctatggaactgtgtgtactggcaatctatgttacttatgcaacctactttatactatatatgcgaatggatatcgcatttgcctggactacggaaagtgtatacggcattttcattctaatattctgttacaggtatatgaagaaaggaaattggcagaaaaagaagatttgaatccttttttcattatcttcgcaagaaaataaacattttataaaatatatgagacaagctaatttatttatgatgtcggcagcaatgttgttagctgcctgcggaggcacaaaagacgcaggcaaaacagaccaagtgcttatcgagaaatcgaacattaagattgaagggaaacgcatgactcccgaggcactctgggctatgggacgtatcggcggattcgcagtatcgcctgacggaaagaaaattgcgtatacggtggcctattacagcgtaccggagaacaagagtaaccgcgaagttttcgtgatgaacgcagacggtagcgataaccaacagatcacacgcacaccttatcaggaaaatgaagtgacatggataaaaggaggtactaagctcgcctttctgagtaacgacaatggaagcagccagctctacgaaatgaatccggacggcagcgaacgcaagcaactgaccaactacgacggtgacatcgaaggatattctatctcaccggacggcaagaaactgctatttatctcacaggtaaaaactaaagagagtacggctgacaagtatccggacctcccgaaagccacaggtatcatcgtcactgacctgatgtacaagcattgggatgaatgggtaacgactgctccacatccttttattgcagattttgacggcaacggcatttcaaatgttgtagatattcttgaaggcgaaccttacgaaagcccgatgaagccttggggcggcatagagcaactggcttggaatacaacttcggataaggtggcttatacctgccgaaaaaaaacagggttggagtatgccatttcaaccaactcggatatttatgtgtataacctgaataccaaagagacgaaaaatatcaccgaagaaaataaaggatatgatacaaatccgcaatattcaccggacggcaagtatattgcctggcagagcatggagcgtgacggctacgaggctgacttaaaccgcttgttcatcatgaatctggagacgggtgaaaagcgttttatcagcaaagcttttgaatcgaatgtagacgcatttgtatggggagctgacgccaagactatttacttcacaggagtatggcacggagaatcacagatttatgcacttaatctggcgaatgattctgttaaagccattacttccggaatgtatgattatgaaggggtcgctttattcggggataaactgattgcaaaacgtcattcgatgagcatgggtgatgaaatttatgcagtagcattagacggtttggcaactcaactgacacaagagaacaagttgatctacgaccaattggaaatgggtaaggtggaaggtcgctggatgaagactactgacggcaagcaaatgttgacatgggtaatctatcccccgcaatttgacccgaacaagaagtatccgacattgttgttctgcgaaggaggtccccagagtccggtaagccagttctggtcttatcgctggaatttccagattatggcagctaatgattatatcattgttgctcccaaccgtcgtggattgccgggattcggtgtggaatggaatgaacaaatcagtggtgattacggtggtcagtgtatgaaggattatttcacggctattgatgagatagcgaaagaatcgtatgtcgacaaagatcgcctgggatgtgtaggtgccagcttcggaggattctccgtttattggttagcaggacatcacgacaaacgcttcaaggcattcatcgctcacgacggtatcttcaacatggaaatgcaatatctggaaacagaagaaaaatggtttgctaactgggatatgggcggtgcatactgggagagacaaaacccggtggcgcaacgcaccttcgccaactcccctcacctctttgtagagaaatgggatactccaatcctttgtattcatggagaaaaagattatcgtatcctagccaatcaggcaatggctgctttcgatgctgccataatgcgtggcgttccggcagaactgctaatttatccggatgagaatcactgggtactgaaaccgcaaaatggcgttttgtggcaacgtactttcttcgagtggctggataaatgggtaaagaaggctccttcagagtaagacctcgagtaaataagataaactccgaaaggtgaaaaatcaacgaaggctctattctcaatcattgagttcagagccttctacattacatccgtcaaaattcgctaaatttactccgaatatatatttttaatctctacgatatacattttatgaaatcctccatgagcaccaccataccatttctccaatgattctttgtccaaaaagcattcggatttgataccgtccgcataaagtttcttacattccagacttaaacgggcttgttcaaacaccacattacctccttccgtaaaaacaggcttcaagccggtttctttgaccttatctgtattacgacctgactttgaaccgcatactgcatgaattttcttattttcttctcctaaaaaagaaagtgtcaggtaatcacttttttcaatgaactcataagtatatctttcgggacggacaaagacaaaggctacaggcttattccacagccacccaatgccaccccaacttgctgtcatagtgttgaacttctcctttgttccggctgtaatcagcatccattcttttccgatagcttcgaaaaagttgtcttttaagtcttttacttctaatttcttcatctctttatacatttataattacttcttcttgcttagttttactatttctcccaaataaggtatttctaccgggatctttcttttctttgcttctgccgcaaacactttaggaggatcgtgcagaggctcatccgacagatcaaaagttccataatgcatagggatagtaagtcctgcatgcatttcttctgaggcagtcagggattcgtaaggggaaatatggttgggacgcataaaccaacggggtttgtatgcaccgatacctagcaaagcataatcaggagcaccgaacaaatcgggaatctcacgaaaatggctggaataccctgtatcaccactataataaagtgagatattgtcaccctgcaacataaaggctccccataaccgttgaccgccgtcacgcacagaacgtttgctccaatgctgtgcaggaaggaaggttatctttaatccttcgtcttctatctgttgataccaacctgcttcaacaattttcatctccgagaaccaactttgaatcaattcacctgttcccaagccgcaaaacagtttcatctgcggattatttttcagcaaatgggcgatacttcgtttatccagatgatcgaaatgatcatgactgacaaggagataatcaatctctgtaaaaatgtcgggattcgcaggaaactcactttgccgttttacaaagggaatatttccgaatacgggatcgaacatgactcttttacctgccaattggaggaagaaagagttatgccccagccatatcaacgaatctcccactacggcatccagcgaacgaagatagcagaccttcggatcccacttcacagccttcttttctttacgctgagggttaggcgacaaacgccatttcaagacactgcccatacccggacggaagcggtgttgtctgttaaaaaagcgcccgcgcaccatcggattgcctcgccaataaggattgacagtagctaaacgttcatttctcctgaaacatatatgttcacccatttttatacttatcgaatacgtctttacaaacttaataaaaaatcccgatttaccatagataagaacaaacaaaaaatgtaccctggacacactatcagggtacatttagttataaaagaataaatattatccttttttaatagaataaacttggttaaaagtggtgcaaaccatataaaggcagttgccagcctagtgctgaaagattaataatcataataaccgcacccaatatccacagaatcagtaacgaccacttcagtcctgtccccattggtgcccaatggaacaactgacgtagaatcgtatataaaaaagctcccaaaggaataccaatcaaagcaaccccggcaatcgtaccaagtaacgtcatcataggagtgacggaagcgataggtgtccagtcaatagcagggagtaattcgtacaacaaggctcccccactcaccgctacggcgattgctgcaaataccacagcaaccaatactatagcaagtacaaacagcaccggacaacagattatgacaagagcaaccaagaatatcttgaagaaaacggcagcaatagccacaaacacgtctcctatcttttgcaaaaaggtacgtggtttgccggaattcacataattatttaccccgtccgctacccgttcaaaaccgtccgtcaccgtcttgccaatattctcaatcgtcaccgcttcgccacgcatacttaatttctcggctgctgtatgagcctccggtatcacaatccacccgactatataaagtataatcatcgggcaataaggaacaaacaccagtacaatcatcagaatacgcaccagtgttatatcccaaccgagatatgcggccaatcctgctgctacgccccccaacaacttactgtccgggtcacgaaacaaacggcgtgaaccggcagttcgtgtatatgtctgactggcagaagatgattgctctgttcgtttattggactcggcatcatcttcggtaattccaaaatcttccggtttacctacacgggctataacttcttccacatcctgaactgtaatgacttgttttcccgcagctactttttcagcaaataattcggcaatacgcatctcaatatcatttataatctcctccgcaccctcttgtttacgaaagtaatgcttcagattagacagataattgtctaacagacggtaggcatcatcatctatatgatagacagttccacctaaatttacggtcaatgtctttttcatttctattatttctttattctaattatctattggctatgtgatttactgtttcggtcaactctttccaggaaagttcgagttctcccaaaaaagtttctcccttctccgtaagtttgtagtacttgcgaggtggcccttgcgtggattccacccactcataacttaacagatcatcattttttaaacgcgtcagcaatggatacaaggtaccttccaccacaatcagttgagcttcttttaacttctgaataatatccgaagcgtaagcaggctccttatgcagcaaaagcatgatgcagtattcaagcatgccttttctcatctgggattttacattgtctactttcattgttccttttcttttgaatggcacaaatatatgtattactttagtaccttgcattgcaaagtactataaattaataataattaaactatcaaagagaattcaccttattacaaaaagaaataatagctatatttgtatcccattaaactacaaaaaacaggtatgttgacaattcaaaaagtaacggttgccgattgtgagcttattaataaaatggcaggcgaagtattccctgcaacttacaaggaaatcctatctcccgaacaattggattatatgatggactggatgtatgctcccgagaatatacgcaaacagatggaagaagaaggtcatgtctatttcatagcctacaaagagggaaagccctgtggctacgtttctgtgcagcaacaggaaaaagatattttccacctccaaaagatttatgtcctccctcattttcaaggtagtcattgtggcagctttttatttaaagaagccattaaatatattaaagaaatccacccggagccttgccttatggaactaaatgtgaatcggaataataaggcattgcagttttatcaacacatgggaatgagaaagttgagggaaggtgatttcccgattggaaacggatattacatgaatgattatatcatgggactggatatttgaaacaaaagaaatatagcgaaataaaaatagggtaataaatgatttatataattcatttattaccctagattttttataagtatactatgttatctacatataatacttatgctactttttctaatttcttcataatagagaaaataaacagagcagataacagacagcaaacaatcaatacactccataccatccacaactgtataccaccccacagataaccaataatagcaaccagataattaccaatagcagtagccacaaaccagccgcccatcatcatacctttatacttgggaggagctactttcgaaacaaaagagatacccattggagaaagcagcaattcagcaaaagtcaagaccagataagtggagatcagccagttaggagaaaccaaaacatccggattaatgcctgccgcttctacttctttcggagtaggaagtcccaaagacccaatggccagaatcaagaaaccacatgctgcaatcaccataccaataccgattttacgtggtgcggaaggctctttttttcttctggccaaatagccaaagacagccaaagataccggagtcaaagccacaacgaagaacggattaaattgctggaagatttgaggaaggatttccactgtcggatccatggaagaataactccatattaatatgccaagggaagccaatacagcgacaccggcaatcgctttaccacgtcctgttttagactggaataaagagaacgcaccataaactacaataatcagaagaaccagattccatacatcaaatccgatacgatcaagccctgttacagattgagtagtataatcacgcgcaaagaatgtcattgtcaaaccattctggtggaatgccatccaaaagaaaattactacggcaaataccagtaacaaagctacaatacgttctttagtctgtgccggagtcagttccggttcattatagttattcactgctttagcttgcttagaattatagtctgcatgcttgaacattgaacgacaacaaacataaattgccattgaaagaatcaaagaaatacaagccacagcaaaaccataattataggcttcagacaatttctctatataagtggaacagaaagcggacatatcaccggtaaaaccttgcgcagcctgcaagctactaagagtagcatttccttccggagtaatagtaccattaaggaattgatgcgccaacgaaggaatctgagcattataggtgaaccctgcgccacctaatatgtagttagtcaccttggtagcagcagtcggagcaaacaaagcacccacgttaatagccatataaaacaagctgaaagctgtatcacgctttgaactatactctggtgaatcataaaggttacccaccattacttgcaagtttcctttaaacaatcctgttccgcaagcaatcaaaaacaatgaaccaaacatcatcattttaccagtaagatttgccgcagtaggaatcgccaaaaggagataaccgacaaacataacaacaatacctgtcgttaccattttaccataaccacatttatcagctaaaataccgcctacaagtggcataaaataaactgctgctaaaaatgagccaaaaatagtagatgtttctgctgctgtgtaaccaaattttgcttgtaagaaaagtgtaaaaatagcaagcatcgtgtagtagccaaaacgttcgcccgtgttagccaaagctaaagcgtataaccctttcggttgtccttcaaacatataaaaagaatattagattaataaaattgatatttcctgcaaatatatactttttttgatttattcaaagaatatgtagccatatttacttcagaataaattgaaattactctgcaaacaggacacaaatttccgctttcgcttcatgtatcagatcttccggagctatttttatctgaagtccacgcacaccggcacttatataaatatacggaaaatgccggcatgtttcatgaatataagtagggaaatgctttttcataccaataggcgaacaccctccccgaatatatccggttaacggcaaaagctctttcatagggatcaaatcacacttcttattaccggaggctttagctgccagttttaaatcgacttcatgctctccaggaataacgcagacaaaatatccgcttttatcaccatgcaatacgagagtcttaaatacctgttctatattctcacccaaactagctgctacgtgtacagcacttaaatccttttcatctacttcataaggaataagctcataagttattttggctttatccaatagtcgggctgcatttgttttattgattttcattttcggtatgtttttagcatagattaaagccccagttcttcgcgaagaaactttggcgtatatcctttagtactcttcactacctcttccggcgttccgtaacttaagagttctcccccacccttaccaccttcagggcccatatcaataaggtaatccgccatttttatcacatccagattatgttcgataacaataactgtgtttcctttatcgacaagtttgttcagtacacccattagcacccggatatcttcgaaatgaagtcccgtagtcggttcatcaagaatataaagagtttttcccgtatcacgttttgaaagttccgttgccagtttcacacgctggctctctccgccggaaagagtggtagatgattgccccagcttaatgtagcctagtccgacatcctgcaatactttaatcttgttcaaaatttgcggaacattctcaaaaaattcaacggcacggttaatcgtcatatcaagcacatcggctatggactttcccttgaaacggacttccaatgtttcccggttatatcgcttgccatgacaaacttcacaaggtacatatacatcaggcaggaagttcatttcaatcgtcttatagccgtttcctgtacatgcttcacaacgtccgcccgaaacattaaaggagaaacgtcccggtttgtatccgcgaatcttagcttccggaagaccgacaaacaagttacggatatccgaaaatacccccgtataggtggccgggttggagcgtggggtacgccccaacggggattggtctacattgactactttatctatattctccaatccttcaatagaatcatattccaaaggatcttgtaatgaacggtagaatttttgtgaaagaataggttgtaatgtttcattaatcaaggttgattttccactccctgatacacctgtgacgcaaatcagtttacctaatggaaattcaacatcaacatttttcagattattacctttcgcgcctctcaaccagatagattttccattccctttccgacgtttagcagggatttctatcttcatttttccattcaaatattgtgaagtcattgtattcgtcttcaacatttccgttggagttccggcaaaaacgacttctccaccgagacgtccggcttttggccccatgtcaatcacataatcggcagccagcatcatatctttatcatgttccactacaattacggagtttcccatgtcacgaagttctttcaacgaattaataagacgcaggttatcacgctgatgcaaaccaatactcggttcatccaagatatatagtacattcaccaactgcgagccaatctgtgtagccaaacggatacgttgactttcaccaccggaaagactcaccgaactacggttcaaagcaagataatccaatccgacatctaacaagaatttcagacgcgtacgaatttctttcaaaatttctacagaaatcttcttctgtttatcggaaagatatacatcaactttcattaaccaatcatataattcgctgatgtccatattcgccaattcgttgatatttttatcatgaatacggaagtgcaaggcttctttattcaggcgagcacctttacattcgggacaaacagttgtttttgcaaattgttctgcccatttctgtgccgtagccgaagcgtctttctcttgtaacatctgaatatacttcaccaccccttcgtaagtgacaaaataatcagaagaagtaccgatcagcgagctcttgatttttatacgatcatcggaaccatacaacacttcttcaattgcatcatccggcaattcctttactggggtcttcagtgttgcatcgtatttttccaacaaagcaccgatttgccagaagatcatagcatttttatattttcccaaaggtgctatggctccttcataaatggattgttcacagtcgggaatcactttatccacatcaatctgattgactactcccagccctttacactttggacacgctccctgaggagagttaaatgaaaaattgtgcggtgccggttcacgataagacaatccggtgacaggacacatcagtcgcttactataatgacggatactttccgtctgtgcatccagaatcatcaacaagccgtctccctgacgcatagccgtcgctacactctgtttcagtcttctatcatctttttcggtaacgaccaacttatctattactacctctatatcgtgattcttgtaacggtcgagtttcataccatgagtaatttcacgcacttcaccgtctacccgaacatagagatatccttttttacgtatttgctcaaaaagctccctataatgtcctttacgtgtacgaatcaagggagccaacaaatagattttctttcctttataatctttcagaatcagaccgagaatctgctcctcggtatatttcaccatttcttcaccggacagatacgaataagccactcccgcacgagcataaagcagacggagataatcgtatatctcagtagtagttcctaccgtagaacgcggatttttattcgtcgttttctgttcaatagagatcaccgggctcaaaccggttattttatcaacatccggacgctccagattacccaaaaagttgcgggcatacgctgaaaaggtttcaatatagcgacgctgtccttctgcaaatatcgtatcaaacgccaaagaagattttccactaccactcaatccggtaatcacagtcaagctattacggggaatctcggcatcaatatccttcaaattatgtacgcgcgcaccatacacattaatatattctgtttcctgcatattcatatccttccataaatgttgcaaaattaatgtttccgcccgaaatatgctcctaaaaaagcacaatattattttcttaactcaaatcttatgaagatatagggcattatttgtacctttgttccttgatttcaagaactaatagttataatttgatgaaaccgataaaccgattattcttatttttgctttttataagcgcttcatacgctatcagttatgcccaagaaaatcaatcatttttcttgcatactatcgaaaaaggacaaagtttatactctatctccaagatgtacaatgtcactacatctgacatcatccgcttgaatcccggttgcgatgagaagatttatgccggacagaccattaaaattcccaaaggaaaggatactcagaaaggggaaacattccatacgattcaagccggggagactttatataaactgactacaatgtataacgtatccgccaaggctatctgtgaggcaaatcccgggttaagcgctgagaattttcgcatcggacaggtaattctcatcccgttggaaaaagaaccaaccaatacggtgcagacttcggtgacacaacctgcgatccaaggtccggtagtagccagatgtaaagagatgcacaaggttaaacgcaaagagactatatttagcgtgagccgcgaatatgaaatcagcgaacaagaattaatcaacgctaatcccgaactgaaaaagggaatgaaaaaaggacaactactctgtatcccttatccttctgcaacaccagtgcaacctacacccaaggaagatctatatgcggttcctcccagcaacagcgaacttttccgtaagagtaaagaaactccgaagaatatctcgactattaaagccgctctgttactgcctttccaggaagacaaacgtatggtagaatattatgaaggttttttaatggcagttgatagtttgaaacgtacgggtacttctcttgatttgtatgtatacgattgcggtaaagaagtttccacgttgaacacaattctggctaaaaaagagatgaaagaaatgaatgtcatcttcggcccgatgcatcaaagtcaaattaaaccgttatctgattttgcggaaaagaatggtattcgtctagtgattcctttctcacaaaaaggcgaagaagtattcaacaatcctgccgtttatcagattaatactccacaatcatatttatattctgaagtatacgagcatttcactcgccaattccccaattctcatgttatttttattgaatcggcaaatccggacaaagaaaaagctgacttcatcagtgggttgaagcaggaattgaaaagcaaaggcatttccatgcggactgtagacgaaagcgcaactaaagaaacgctgaaagcagcactacgcaacgataaagaaaatatctttattccgacatccggtaaaaatgtattattaatcaagatacttccacagttaaccctgttagtcagagataatccggggcccaacattcatttattcggttatccggaatggcagactaacacaaaagatcacctggaaagtttctttgaactagatgtatatttctactcctcattttatacaaatactttgttcccggctgccgtgcaatttactaatgcctaccacaaatggtacagcaaagatttagccagcaaatatcccaactatgcaatgcttggtttcgatacaggtttcttcttcctgaaaggattgtcacgctatggctcggaactggaaaataacctgtccaagatgaaccttactcctatccagaccggtttcaaattcgagcgtgtaaacaactggggaggatttattaataaaaaggtgttcttcatacgtttcactaagaactttgaattagtaaaacttgatttcgaataatacgaaaatgataaagataaagacatttttgctcgcaacactcctgcttacaggacttgtttttcctgctactgcacagatcggagagccacgaagtaacttctctgttggtgtcaatggaggtgtcaacctgaacagcgcttccttcactcctactattaagcaaaacagccttatgggaattaccggaggattgacggcacgttatatttccgaaaagtattttgccatgatctgtggcgcacaagtagaacttaatatctcacaacgaggctgggatgagttatttgaaatggaagatgaaaacgggcaaacgattaaagtacccggcaagacatatacccgcaagatgacctatgtcgatatcccttttcttgcgcatcttgctttcggacgagaaagaggtttgcagttctttgttcatgcaggtcctcaaatcggttttctgatcggcgaatcggaaacaatagagggcatagatatgaatacgttgtcgaacacccagaaagcgatatatggagttaagatccagaataaattcgattatggtatcactggcggtggcggcgtagaactaagaacgaaaaaagccggcagttttttggtagaaggtcgttattattttgccttatcagacttctactgtacaacaaaaaaagattatttcgcccgcgcagcgcatggcacaatcactgtaaaactcacctatctttttgatttgaagaaataaataatctctcatcagattataaaaatggccactagttcattgctgaaacagtggccattttatattatattcttatttctgacgattatctcaatctatcggcagctttaaccataacttcatcacgtcctatagaacggatagccagtatattcagaatgatagaaacaaggggtaaacaaagcgcccaaccgatacggaaaagattctcatcgtttttcaatgcaaaataaaaagcaaagaaagcaatataatatcctaccagcagcaagctattgaaaatagacatacgaatctgcaacatacgattcttatataaaaagatagtagcaaaagcaactatagtgctaagcatcaatatgccaaacaatccccatgtagattgaaaagcaccatttacatccattcctaaagctttgaagggatgttcgcccattgtatcagtaaaatatcccattggcaaacacattgccgtaataagcaaccctgtaacaatcagtaaataaactgtttgaattcgttgaatcataagtattctaatagtagttaagttaaacaataatagccaagcaataaggaataggaattactttcccgcttactacttgactatcaattctttcgtcagaaaataaattactgaagtttttccttttcctttgccggatttctataatatattttcccttcgatgtattcttgcgtagcaatcaagtccggtttcggcaacttctcataataacgagaaatttcgatttgctctctattctcaaatacttcttccaagttatcattgtaagaagcaaactctgccaatttcttagaaaggtcgttcttgatttccacgctgatctggttagcacgcttaccaataatagcaacagtttcataaacatttcctgtatcggcacagagttccatcatgtcacgggttaccgttgtagcaggagcattcgtttttttgtagtccataaatctatttaaatttagtctttaattactttttgtgattcattaaatattttctcagcctctttcaagtacttgctttccggaaactcattcttaaaagcataatactcatcaacagtttcacgataacgatccgcctttttatcttccacgctataaatagccatttcgtatcttgcacgcagaattaatatagaaagttcttcgcgataatcggtataaggataatctttcagtgcattctgagccgtgattacacaagactcataattattacccatataattacccaaattataatatagttttgccgaataaagttctttcaacaccagcttatcctgcaaagcaaaaatcatatcctgagcttcctgcttcttgacactattcggaaagtattccatgaacatctgtaattgttggatagcctgataagtactcgattggtccagacgtggttccggagtatccaagaacaaggccttacctgcatggaaacgtgccaattcggtaaatgtgccacgcggatatgtattaaaataggtgataaatgtctgggctgctgtctgataatctttctgattataatagctcatacccaacatatacaaggattcttccgctttatcggttcctttaagaatggttattaactcgttcagcaaagtagctgagcggttatactgccctttcgcaaaatagtttttggcggcttcgtacttgtattcgtaatcggtgcttttcagcaatttattatactctccacatgatgtcagagtggctgccgcaagcaaagttataatgatatttttcttcatcctatttaaaaataatgcgcaaagttacttattcgctgggaatttagcaattaatctatgttttttaatacataaaaggcgttaaacatcgacaaaaggggagaaaataacggcgaaccggaaacaatatacggtgaataaactacacatcacttaaaagcgcaacctattcaccgcatattatttacaattcattttctactgtctacatttcagctataatactacaatttatacaaatcgcttgccgccaacaggtcgactttcttttctttcagcacttcgatgcatttatccagattgctggggcgaatcaccacatttgcaatattgttgttagcaaatgagtacatatattcaataaacactccttcagcagacaaatatcccagtacctttgccaaagctcctggtacgttcggacagctaatgccgaccacatcagtcacattcactgcaaaatgattgtcttttaaggctttgtatgctctatccggatcggatacaattccacgcagaatgccaaaatcagcattttcggcgatgcacaaggcagaaaggttgatattttcttttgccagcacttcagtcacttccgtcaaacgacctgacttgttttccaaaaagatagaaagttgttttgctaccataattatttaagtattaggtttacagttttctgttatcaatcactcgtttcgctttacccacgctacgttcaatactacgtggttctaccagtttcacattaacacccaatccgagtacactttgcaaacgtcctgccaatttcttcttcaatgccaacatccggttgatttcgtccgaataaaaatccggacgtacttccacctggagttccatggtatcggtattattttcacggcctactattaacaggtaatgcggttcaaattctgccatttcaagaataacagattcgatctgtgtcgggaagacattcaccccacgaataatcagcatatcatcactacgtcccaagatacgatccatacgtaccaacgtacgaccacaggaacatgtgtcataatgcaaggcagttaagtcacgagtacggtaacgtaatagtggcatcccttcttttgtcaaatgagtaaataccagttcacccgtttgcccgggttcaacaggttgcagggtattgggatcaataatttccggaaaataatggtcttcattcaagtgagtgccgtgttggcattcacattcgtaccccacacccggtccggcaatctcactcaaaccataaatatcataagccttgatacccagtttttcttcaatttcatggcgcatttgctccgtccagggttctgcaccaaaagcaccgactttcaacttgaattcttcgcggggtaaaccggagtctttgatcgcatcagccagataaagtgcataagaaggagtacaacaaagcaccgttgaaccgaaatcatgcatcagtgtgatttgtttctccgtattaccgctggacatcggaatcacggatgctccgatattttctgcaccggcatgtgctcccaatccacctgtaaaaagtccgtatccataagacacctggaaaatatccgaacggccggcaccataagcagtaaaagcacgtgagatacattctgcccatgaagacaagtccttacgggtatatccgacaacggtcggttttccggtagtaccagaagacgcatgaatacgcacaatctgactcatcggcacggcacaaagtccgaacggatagttatctcttaaatcatgttttgtggtaaacggcagtttcacaatatcatcaatactgttgatgtcatcgggcgtgatacccatttcctgcattttcttccgatagaagggggtgttgtgataaacgtaatctacaattttcttgagtcgtatgctttgaatcttgcgaagactttcgcggtccatacactcaatgctctcattccaaatcatgtgtttctggtattactagttgtatgaatctgttttttgatattaatatgttgcaaagtaaaggatttatttggaaaaatgatttgttatctcgattattttaccgaatattgctccactttttaggatttaactatgaattttgaattaacatcagcctacaaacccaccggagaccaaccggaagcgattgcccaactaacagacggagtaatccagggacttcctgcacagactttattaggagttaccggttcgggaaagacattcactatcgccaacgttattgctaacatcaacaagccgacgttgattctaagccataacaagacgctggctgcacagttatacagcgagtttaagggattttttccgaataatgcggtagaatactatgtttcttactatgactattatcagccggaggcctatctacccaacagtgatacttatatagaaaaagaccttgctatcaatgacgaaattgacaaactccgtcttgctgccacttctgccctactctccggacgaaaggatgtggtcgtggtgtcttccgtttcttgtatctatggcatgggaaatccttcggacttctataaaaatgtcatagaaatcgaacggggacgtatgctcgaccgcaacgtattcctccgccggctagtagatagtttatatgtacgcaacgacattgacctaaaccgtgggaatttccgtgtcaagggagatacagtagatatttatctggcctatacggacaatctgctccgtgtcactttctggggtgacgaaattgacggtatagaagaggtagacccagtgaccggagtcaccattgctcctttcgaagcttacaagatttatccggcaaatctgttcatgactaccaaggaggcgactctccgtgccattcatgaaatagaagatgatctgaccaaacaggttgccttctttgaatcaatcggcaaagaatacgaggccaaacggctctatgaacgggttacttatgatatggaaatgatccgggagttgggacactgctccgggatagagaactattcacgttacttcgatggtcgggctgccggtactcgtccatactgcctgctcgatttcttcccggacgatttcttgattgttattgacgaaagccatgttagcgtaccacaaatccgtgccatgtacggaggagaccgtgcccgtaaaatcaatcttgtagaatatggcttccgtttgcccgcagccatggacaaccgtccgttaaaatttgaagagtttgcagaaatggcaaagcaggtgatctatgtcagtgccactccggcagaatatgaattgattcagtctgaaggtattgtcgtagaacaagtgattcgtcccaccggcctgcttgatcctatcattgaagtccggccgagcctgaatcaaattgatgatttaatggaagaaatccagcttcgtatcgaaaaaagcgaacgtgtgcttgtcactactctcaccaaacgtatggctgaagaactgaccgaatatctccttaataataatgtaagatgcaattatatccacagtgatgtcgacactttggagcgtgtgaagattatggatgatctccggcaaggtatatacgatgtactgattggcgtcaacctgcttcgtgaggggcttgaccttccggaagtatcacttgttgctatccttgatgcggataaggaaggattcctccgttcacaccgttccctgacacagaccgccggacgtgctgcccgtaatgtcaatggaaaagttatcatgtatgccgacagaatgacggacagtatgaaactcaccatcgacgagactaaccgccgccgcgaaaaacagttggcttacaatgaagcaaacggaatcactccccaacagattaaaaaggctcgaaatctatcagtattcggaaatgcaaactcggaaacagaagaactgctgaaagaaaagcacgcttatgttgaaccttctactccgaatattgcagcagatccggtggtacagtatatgagcaaagcgcaaatggaaaagagcatcgaacgtacccgcaaactaatgcaagaggcagccaagaaactggaatttatcgaagctgcgcaatatcgcgatgaattattgaaactggaagacctgatgaaggagaaatggggataaactttcctcattctccacatactatattctgggtattaagggctataaattcttaacaagtctataatacaaacatccattttttaattagtgttataaaaacaccttttatctgctgttaatttgcagatatggcaaaacaacgtatctttgcagtgtgtttttcatagtattagatttaaggttaacaaaggttggagcaaggcgttgctcctttttttatgcccatacgccaggtggacttcctaatataatattacttgtgatccgggctctacgcttatacaatcctccttaaattttctcctgaaagtcgggttgccccgacttcattataaataaattaaagcgccttatctattgcacttttaatcaacggctccattatatcatatccctcactcgtcggatgaactccgtcttttgtatattgaggattcaatgcctgattttcatcaaccaccattaccttataataattcacgaacggaattttattagccttcgcataagcctctatacgagcatttaatgcttgaatcttctgtggcgcatctttgatttccattctccacttaaaggcggcggcaggaagaacggaagttaatatcaccttaatcttattcgctttagccaactctaccatagaaacgatgttaccaaaggtttgatcttcattgtaaacatttgtattttccgctacatcgttcgttcctgcattaataacgaccaaagccggagaaagatttatcacatcttcccgaaaacgcaacaaaaactgataagaagtctgcccactgataccacgactaatatatccgtttgacttaaagaaatcaggatgagtccttatccaaccttccgttatcgaattacccataaaaacaactcttttttccttctttgacggcttcggcaatgccgcattctctttagcaaaacgagcagagttcgcaaaatctctttcctgtgcaaacgtctctcctactgagaaactcagacaaacaacagccaacatgatccactggcttattcttttctccttcatgtttatattttaagtattagtgaaatattaattgcatgcaaagataaagaatcttgctacattttactactcaatcagcgaataaccgttaacatggaagtacattttcttaatctatgttatataacatattgtttttcttgaattatttgctaatgtcgcaaaagtccgtacctttgcaatgtgtttttcatagtattagatttaaggttaacaaaggttggagcaaggcgttgctcctttttttatgtccatacatttgatttcctgaaaaagagtcgtatttttgtacactattcatataaaaggaaaatgaaacgaaaattactctatatcactttaataataaccattctatgtgtaattagcattattatatgcaaccggcgaatcaagaagaatgcatctcaaaaattatatactgaaattacagaaacacctaaaaacaatgtagggctattgcttggtacttctcccaaactaaaaaacgggaataacaatttatattttgactaccgtatttttgcaactcttgaattatacaaagccggaaagataaattatatccttatcagtggcgacaatcgtaaagaaaattataatgaaccggaagagatgaagaaagcacttatgcaaagaggagtcccggaaaaatacatttatctggattatgcaggatttcgcacactcgattccgttgttcgtgccaaagaagtgttcggacaaagccgactaacaattatttctcaacgttttcacaatgaacgagctatttatttagcagaaaagaatggaataaacgctatcggttacaacgccaaagacgtgaatgcttattcaggactgaaaactaatattcgagaattatttgcaagagtcaaaatgtttattgacttggcaataaacaaacaacctcattttttaggagacaagattattatcggaaaataaaaacaattatggaacaacaaattcaactcaacgaccacaacaaacaggagtatcctcctatgcacactgcggagcatttattgaatgccactatggtgaagacattcggttgtccacgctcacgtaatgcccatatagaaaggaaaaaaagtaaatgtgactatattctttcctcttctccgacagcggaacaaattcaagcgatcgaaaataaggtgaacgaagtaatcaaccagaacttgcccgtaacaattgaattcatgacacacgaacaggcaaaaaatattgtagatcttagcaagttgccggaagatgccagcgaaacacttcgcatcatacgtataggagattatgacgcttgcgcttgtatcggggcacacgtctcccatacctccgaagtgggcactttcaaaatcattagctatgattatgacgaagcaagacaaactctacgattaagattcaaactggtttaaaagggaagcacagtttatgcaaagagtttcaaacggatttggaacacattgtttcaaccctacttgaaacaatgtgtttccttacgggaaacaaaatgtttctcaccgagaaacgaagtgtttcccatagtgaaacaaagtgtttcatgctttgaaacaaattcaacctaccgtttaccggcttttcctatagctaatcaccgcccaactattgaagaatacagcaaaaagagacagaatacctatctccggcaataaatcgaccaagccgcttcctttcagatataccatacgcatcgcctctataaaatattttaaaggattgaatacagtgatagcctgcgcccattccggcatactgctaaccggtgtaaacagtccgctcatcaacatcagaatcaacatgaaaaagaacatcacaaacatagattgctgcatcgtcgctgaatagttggatataaccaacccaaaaccggacatcaccagtacaaaaaaaatcaccaagagatagatcatactaaaatgccccacaggtactatcccataaagcagccaagccaacacaaaacataatgtcaacacaataaaacctacaatccagtaaggcaaaagtttagcaagaataaaagtaaatttaggtacaggagtaacatttatctgttcaatggtcccgacttctttctcactgaccacattcaaagccggcagaaaaccacaaatcaatgtcaacagcattgccattaatgccggaatcatatagagcttataattcagattcgggttaaacagcccttgcgtatcaatacggatagaaggaatgattccggatacagaaacagcctccggacgttccgagcgtaattcggacgcataaccattaataatagcggtcagataagaactgcctaatccgccttttgttccattcaccgagttggcggctactaatatgtgcgcatctctcccattcatccagtcacgctccaaatgcctaggaatctccatgacaatatccgccgtacccagttcaatattccgtaatccttcttcatacgaagccgggacctccgttaaatggaaataagtagaagcggcaatcttattcaccaatcgttgcgaaactgcagaatggtcattgtcaactatattcaaccgaatattctttatctccatattcaccgcccaaggcatcaacagcataatcatacaaggaaaaataagaatcaacttcggtagaaacgagttgcgaagcaactgtttaaactctttttctatcagaaactttatcataaccgttactccaatcgatatttaaacttcttaatgctgacagtgataagcacggttgccattaacaacaaaatgccaatctccttaaataccagtacaaccgatactccttcaatcatcagtttacgtacagcctggatataccagcgggccggaataatatccgatatcaactgaagaatcaacggcatactctccacagggaaaatcatactggacaacaccatggtaggcatcatcagaatcatgccggaagccagcatagccgccacttgtgtacgtgttaccgatgaaatcagcaatcccaacgacaacgagacaaaaataaacagcaaagacaccaccaccaaccaaaacaggctgcccactaccggtacatccagtacaaatacagaaagcaacagaatcgtcaccaaattgacaaacgacaatacaaaataaggaactgccttcgccagaatgataaacagcggtttgacaggcgataccaacaagacttccattgtgcctgtttccttctcacggacaatagagatagaagtcatcattgcgcaaatcaacatcaaaatcaatcccattactcccggaacaaagttataggcgctcttcatttgcgggttatacagtaactttatgtccggagtcagacgagccgacgacgatatgcccggagatatcatctcctgtcctaccgcagacacaatgcccgtagcatagttgatttgcgaggtcgacatattagggtctgttgcatccacaatcaactggacacgtgcgtcaccgcaataaagtccgtcggcaaaatgttcgttaaagacaaccaccatatctattttatttttcaagaaggcagcctccatttcccgcggagaatgaaaacgcctggtgacagtgaaatactcactagcatccagccgatcaatgattttccgtgtcaccacatcattagagggatcgagaacagcaagccggacattttttacctccgtactgatagcgaagccgaataggataatctgcacgacaggcattcccaacagaatcagcatcgtacgccgatcccggaaaatatggtaaaactccttctttacgaaagctataaactgtttcataatcaatctgctttacgtaccgcatggcgggccaattgttggaaaacatcatccattgtatctgctccgaactgctgcttcagacgggccggtgtgtcaagagccttgatctgcccgtccaccataatggaaatccggttacaatattcagcctcatccatataatgcgtagttacaaatacagtaattccccggtcggctgcctgatagatcagttcccagaactgccggcgcgtagcagggtcaaccccgcccgtaggttcatccagaaagacaattctcggctcatggaaaatagagaccgaaaaagccagcttctgtttccagcccaaaggaaggcttttaaccaacgtgttccgctcggcagaaaatcccaagcgttccagcaattcatcagtcttctgttctatatctttttccttcatcccataaatccccgcaaacaggcgaatgttctcccaaaccttcaaatcctcatatagagagaatttttggctcatatagccaatatgctttttcacttgttccgcttcccgggatatatcaaatccggcgactttccctaccccggacgttggcttgcttagtccgcataacatacgcattgcagtcgtctttcctgctccgttcgctcccagaaaaccgaaaatttctccacggttcacttgaaaagaaatatggtcgaccgcagtgaaattgccgaaacattttgtcagctgttctacttcaataacaggagccattgtatgttgtacttcttcccgttccaacgaaggcggacaaagaatggaagcaaattcctgtaaaatccgttcgggagtatcaattccatgaatctctccatgattgataaaagctatccggtcgcactggcgggcttcatccataataggagtcgaaacaataatcgtaatgccctgttcccgtaagtttcgcaacatctgccagaactctttacgagacaccggatcaactcctgtggtaggttcatccaagaacaaaatatcgggtttgtgaatcagcgcacaacttaatgcaagtttctgcttcatacctcccgacaaagctcccgctctccgcttcttaaaaggctctatctgttgataaatatctttaatcaaagcataattctcttgaatcgtcgtatggaatacggtagcaaaaaactccagattctcttctaccgaaagatcctggtacaaagaaaaacgaccgggcatataccccactttggtacgaatcagttcatagtcttccaccacattcagccctccgacagttgccgagcctttatctgcaagcaacagggtcgtcaagatgcggaacaacgtactcttgcccgcaccatcgggaccaataagcccgaagatttccccctgctctacaacaagagaaacctctttcagagcttccacttttccgtagctcttacttacatactttacaacgactataggttctccttttctcatctttccggttcttcgtcatcaaaacttgactccgccatacataccaattttcaacgctccgtcattttccacggcaatctttaccgcatacaccagattggcacgttcgttcttcgtcagaatggttttgggtgtaaattccgaccgttcggaaatccacgtaattacacccgtataagccttctgctccgaatttccataatcggaatataccgtcaccttatcacccagtttcacttgtgatagctgctccgaagtgatgtaagcccgcagatacatacgacctatttcggccaccttaaacagaggtttgccaacagccgccagttcaccggcttctgcatatttcgctaataccgtgccttcaatcggcgactgaatatgacacttattcaattggtctttcacttgtgccacttgtatggcaacggagtttccctgctccgtcaaactattcgtgctattcagcaacgatgattcttgagctgcaagctgtcgttcaagcagtttaacctgcgcatcccagtcatccaattgtttctggtttgccgctcctgccgtaagcaaattctccactctctttttctcccgctcagccgtagcaatctgctgtttggtagcagcaatttgtttggctaaatccggacgctggctttccaccgatttcatgttagcctccagttgtagttttttcaagtacaactgaagcgtatccaccaggccgatttcctctccagtctgcaaccgcttcccttcctcaatatccaaattcaacaatttgccggcaacttcagcggaaactataacttccgttgcttcaaacgtgcctgtcgcatcatagtcaggcgttccatttccgcaggcagatagcattgtcaatgctatccctcctattcctatttttatcattcgtttcatatccgaagaaaatctaattaatggtttgtagtatatttcaattgatagatacctttcaaccgctggatttcgtgcatcgctttcgtctggcgtgccaaactttcattcgtcagttcccgaagcatctcagtcaccgtcaaagtaccgttcgccactttggcttccgccgatttccgaatgttggtacgcaagcggataatctcgtcatcatccttcatctgtttctccaatgaacgaattgcctgatcctgctgcgtcatttccagacgcgtattaaaaagaaacacatcacggttattattcagttgccgacgtttgttctcaatcacctgccggtcattcttcagtgtatacagactcccgaaattccacgagagtcggacaccggctatataataaggagagaactcattcttcagcatattcaatcccggattcccataagcaccttgcacatataatccaaactgtggcaagtggcgtacattcaatgctttctcctgtatctgcaaccctgcaccctgcgcatcaaacaacgacagttccggccggcggatgtcgctgactgccgaaacatcattttgcggaaccggtttctccagttgtgtttcctgagataattcctcgcctatcaatatggaaagcatctccagatacgcaacgcgcaaggaagcaagttccactcttttctgctgcgtgttcaactgctccaccttcacagcgtccagatcagcctgattagcaattccattttccacataggcggtgatctgacgataattccgtcccaactcatcctgcaacaaagcattctgccgcaactgctcatccagtaaaagtatcccgaaataaagatcatttacccggctattcaacgaatacatatccacgttcagcttctctttctccacgtcagcctccgctatcgtctgtttcttctgcatccggattcctccaccgtcccagattttctgttgcagttccagcattacctgatattggtctttaggcaatctctttagttccacaccgggaatcttcaccggcaattccgtcacatcactttgataagaagccttggccgaaagagcaaactgaggcagataacctttggccgcattctccagattatattcctttgtcttctccaccaatccatattgatgtaccaacggataattttcctgcgtctttcgttgacattcctccaacgtgatttgcgcatacatccccgatacaaacaataaaaaggagagactgaaaaccattcttttcatacgcatctttttctattagtttttcgaaagacaaagataagaggtttcaaatatacagtcactctctatgagttggtaaatatgttccaatagttcgataaatcagaaaaaaagaattaagaaatatctttttattacctttgcaggaaaagaaaaaatagaatggaacagaagaaagcaccgttagacttgggacttaaaatgttggagaactacaaaattgttcgtcataacgaatttcgttttatttcctctgagttcggattcgtcaacagcttcattaaaatggaaccgagtcttttcgcgttcggacagccgtatcgtataaaagaaggtcgtatcgcactggtcaaacaaggcgttgcacgtgtttctattaatctgatagaacataatctgcaagcaggaaacctatcattaatgactcccacctctattattcaggtcatagaagtctctcctgatttcgatatgcaaatgatagccatagataacaacttcctccctatctccgagaaagaagattttttcacctatctcttacatcatcaaagaaatattctgttatcattaactccgcaggaacatatacaactagagaagtatttcagtttaatctggagcattctgcaagaacctcctttccgccgggaagctatacgacatcttatcgccagccttttatacaatatagaatatatagctaaacactataatcaaatgaaaggagagcgtttgacacatcaagagagtattttccagcaatttatttctctagtcaactcttatagcaagacagaacgcaatgtcggcttttacgcagacaagttatgcctcaccccccgttacctgaacaccctcatccggcagaccagccaacaaacagtaatggactggataaaccagtccattatactagaagctaaagtattgctaaaacatagcaacctgcttgtctatcaaatttctgatgaattgaacttccctaatccttcttttttctgtaagtttttcaagcgaatgacaggaatgacgccacaagaatatcagaaatcggaatgagttcttattttgaaaactctttgattctctgttcttcttccaatttacaaatcagcagcgtatcatctttttcggcaataatatatccgtccaatccttgtattaccacgcgcttttcttcactggtatgaacaatacaattcttgctttcatacaaacgaatatcagttcccaccatagcattgcccgatttatcctgtggcaatagtccacggagggctccccatgtccctaaatccgaccagccgaaagaagcaggaagcacatagatctcctgtgccttctccattactgcatagtcaatagaaatactttcacaggtcggaaacagcttcttgattgattcattttctttttcagtatagaaatccgggaaaatacgatcaaaaatctgtgctatccccggagcatatacacgcatcacggaagtaatagtacgcacattccatacaaagattcctgcattccaaaagtaattgccttccaacagatatttctcggccgtttctttgtccggtttttccttaaatgcatctactgtaaatatctccttatcagtttgaagctggtcggcggcggcaatataaccgtatcccgtttccgcacgggtcggccggataccgattgtcacaatggcactgctatcatcagtgaaacgaagagccttctccaccacccgacggaattctcccgtatcaataaccaatgcgtccgaaggagtcaccaccacattagcattcggatgttttttctttatcttccaacaggcaaaagcaatacaaggggccgtattccgcgcacaaggttccgccagaatattactttccggaatttccggcaactgctcccgaacaatatctatatatttttctgaagttaccacccacatattttctctgggacagacaccgtcaaaccgatctgccgtcaactgaatcaatgagcgtccacatcccattacgtctataaattgtttgggacattccggcgtgctcatcggccaaaagcggctaccgatgccaccagccattattaccacatgattatccatacctgttattctcctataaaaaacacatttgaaataattgcgcaatttactccaaaatgtccaactttacaagaaaaacaaaacacttttatcataaatccatagtaataacaggagtactatttcgttgattggcaaaatatgtcccttctaagtaacaagagacacacctcctccttttcgctaaaattaggtcaaatattcctttttattgattaaaaaggtaagtgttttccagacgataattgcatttcattctcttttatctatatttgtgcccgcatttttatcacattttattagccaccctattcaaaatttacaaaaccaagataagccggatggaaaaaattaacgcaataattacaggagtcggaggatatgttcccgattatgttttgaccaatgatgagatttctaaaatggtagataccaccgacgaatggattatggggcgtattggcataaaagaaagacgtatcctgaaggatgaaggactagggacctcctatatagcccgtaaagcagcgaagcagttgatacaacgtaccagaacgaatccggacgatattgatctggttattgttgctaccaccactcctgattatcgttttccttccactgcatcccttttatgcgaaaggctgggattgaaaagagcttttgcgttcgatatgcaagccgtatgcagcggttttttgtatgcactggaaacaggagctaatttcatccgttcgggaaactataagaaaattatagttgtaggagccgaaaagatgtcatcaatcatcaattatacagatcgcgccacttgtcctatttttggtgatggaggggcagccgtcatgctggaagccacaaccgaagatttaggtattatggatgccgtattgagaacagacggcaaaggattacctttcctgcatataaaagccggtggttctgtatgtaccccctcctattatacattggataatcaaatgcattatatctatcaggaaggacgtactgtattcaagtatgccgtagccaatatgtccgatgcctgtgaagctgtaattgaaagaaatcatcttaacaaaaatgatattgactgggtgattcctcatcaggccaatcaacgcataatcagcgctgtaacgcaacgcttaggagtaccttccgaaaaggtcattgtcaatattgaacgatacggaaacaccagtgccggtactctcccactctgcctttgggatttcgagaataaactcaaaaaaggagataatataattcttacagcattcggagcaggatttgcctggggagctatttatgtaaaatggggatatgacggcaggaagaagtaataagctgttgttatcaaaagatacatacgatgataacaacaaataatgaatcagtaatctttttcattttatacaactttagtgattagcttcaagcatctgtttattgacatatttaggatcaatgaataaccctgagggttaaatatataaattgttatctttgtctccaaattaatagcttatgaagttaaatggttatcaccttcttcttcctgaaggaactttggattactttgatcttgttgatgtgaaggaaagcatgaatgaagttatcatttaccttgaggagaagaatcagctccccgagaagtatgctggtcaagaaacagagagtaaagggttttatgagcctgttgttgttcaagactttcctcttcgtggcaagaaagtctttttgaacctccgtcgtcgccgttggattttgaaaagcagcaatgagtatatttcccgcaattggcgtatggtggctgagggtactcgtttgacgcaagactttgcgtcttttttaaaagaactatattgataattatccgatcagttgcaagttattgggtactttatatggcgttgacggggatttgttggaacgtcaataccgcaaccatttaagtaattacctacactgggatcagcttgctcacgcagagaactggctcctgtttgagaagaacattggtgcctacgtctgtattgacgaagtggctctttcccgtggagaactctatacagtgttgattaataaagagactcacggtggtaaaggcagtattattggtatcattaaaggtacggatgtttgcacggttacctctgtcctgcttaaactttcgcgtcgtcgccgctaccaggtgcgtgagataacattggatatggctcccaatatggaacagattgcccggacttgcttccctgctgccaaacgggttacggatcgtttccatgtacagaaattagcgtatgaagcggttcaggagatgcgggtgaaagctcgctgggaggctttggacgaagagtccatacagatagcttacgccaagacctgcggaaagatgtatcatgcgcccgttttcgccaatggagatacaagaaaacagttgctggcaaggagtatttatctgctttacaaaaaagaatctctatggactcagtctcaaaggatacgggccgagattctatttaaagaatatcccgatataaagaaaggatattatatggccatgcggttaggatcaatctatcatcagtgtaagtttaaagatatagctttgacaaggcttgcaaggtggtatgatgaagtagacaaagcggggtttctcacctttggaagggtagcgcgctcgatacaaacgcactatctgaatataataaacttctttgaaagaagggctaccaatgcagcagcagaatcatttaatgctaaaatcaaagcgttcagggcacagttcagaggagtaagagataaagcatttttcttgtatagactcgctaaattatatgcataaaatgaaaatccctcagattcttacgttgatcctgtttttcatctacttccagcaccttaattgcctgatacacaacaaaaaaagggagtaaccaatgttactccctttcgcggtgcgtacgggactcgaacccgtgaccccatgcgtgacaggcatgtattctaaccaactgaactaacgcaccatttttagatattgcatccctctcgaatgcggatgcaaaggtagatatttttttgaaacctgcaatagcttcagtatcttttttctgaaaaagtgggtttattaagaattatcatgtacatttgcaagcattacataaaatagaaaatagaatgaaaaatacaccaattgaacgacatctgattgatgaaaccataaatgagtttcaaattgtcgatttttctaaagcaaccattcgtgaagtgaaagctattgcttcaaaagcagaagcagcatcgggagtcgaatttatcaaaatggaaatgggtgttccgggacttcctccttctgcagtaggcgtaaaagctgaaattgcggcattacagaatggaattgccagtctatatcctgatattaacggattgccggaactgaaaaaagaggcttccaactttatcaaggcatttattaatgtagatttaagtccggaaggttgcgtgcctgtcaccggctccatgcaaggcacatttgcttcattccttacttgtagccaatgtgacgagaagaaagataccattctgtttatcgaccccggattcccggtacaaaaacagcagttggtggtaatgggacagaaatatgaaacattcgatgtatatgattaccgtggtgataagctgaaagagaagctggaaagttttttgaagaagggaaatatatccgctatcatatactcgaacccgaataaccccagttggatttgcttaaaagaggaagaactgcggattatcggtgaattggcaacacaatatgatgtgattgttttggaagacctggcctatttcgcaatggatttccgccaggatctgagcaaaccttatcaggcaccattccagccgtcggttgcacattatacagataattatgtattgctaatttccggttcaaaagcattcagctatgccggacagcgtatcggtgtaagttgtatatctgataagttatatcaccggagttatcccggactgacgcaacgttatggcggaggtactttcggtacagttttcattcatcgtgtactttatgccctttcttcaggaacaagccactcggcgcaatttgctatggctgccatgctgaaagcggccaatgaaggacaatataacttcctgaatgaagtgaaaatatatggtgaaagagcgcagaaattgaaagaaatcttccttcgtcatggctttcatctggtatatgataacgatctgggcgatcctattgcagacggattctatttcacaatcggctatccgggaatgactagcggcgagctggctaaggaactgatgtattatggagtcagtgctatttcgttagtgacaaccggaagtcaccaggaaggcttgcgcgcatgtacctcttttattaaagaccaccaatatgcgcaactcgatgaaagaatgaaactatttgccgaaaatcacccggtagtataaatatttaccggaagatattcacaaaagctactcttaaaatgaaaaaaaacggaaagaacgattgttattccgttttttttcttactttagtggcatgaatatcgactctgacatatttaagattcaatcaaataatgtgttgccgtcaagaggaaagattctaatatccgaaccttttttacgcgacgtaacgtttggaagatctgtaattctactgattgaccatacggaagaaggaagtatgggattggtcatcaacaagcaactgccgttgcttctcaacgatatcatcatggaatttaagtatatagacgaaattccattatataaaggtggtccgattgcgactgacaccttattctatctgcacacactagctgacattcccggtgctatttctatctgcaaaggactttatctgaacggggactttgaggagataaaaagatacatattacaaggaaataagattagcgaacatatccgtttcttcctgggctattccgggtgggaaagtgaacagttgagcaatgaaatcagagaaaacacatggctggtctccgaggaaaagaaatcttacctgatgaagagcgacaccaaagacatgtggcggaaagctttagagaaattaggcagcaagtatgaaacgtggtcacgttttccacaggtacccacacttaattaatgatgaactgtgaacgacaaacaaaataatatgccattcgttcacaattcgtcttttatcacttgcagtttaatttaggattcaaacactggaaaagtgctgcatctttgtagcagcctcctatctgcaaccaattctttaacaagccgcattgcacaaaaccgcaagatgtgaatagcttcatacaaacatcattgtcgacagctacgtgtgcataaagctgcgttaaagaaagaaagtcaaaagcatactcacaaagtaaattcaatgcatcgcccgcatatccttgctgacgataatccttatgaatagcaattcccacctccccccgcgaatgaaggggaacaaaatccgtaatatcaatcgtaccaagtatgcagtgatcggattttctcacgatcatcagacgtagctgcttgtcggcaaaaacatcgcattgagaaccttcgatgtactgtcgtaatacgtaacgggaatacggaacggtgaaattgctgatatcccacatcgacgggtcattttccatttcgtacatcacatccatatcctctggctccacagcacggagataaatacggtcgtttattaagaaggactgtttcatagtgctttagtctttcgtgatatgaagttcgttacgcaatcttttctcaccaggcagacagaaaagagaagcagtgagaccaatcaacatacaaagatttcctgtggtactaagcgtcagataatagcataaaagattggtaacgatagcgacttccaatatgccgagacggacaatgctccattgcacataacatttcaaagcaagcgtgatcgtcatttgatctattttctttttaagcaccaggctgaataatttaagagaaaggggaatacacaaggccgttagcagaatccctaatgtctcaaaataataaacggcttgtgcattgtctgccaaacttcctacgggaaggagttcaaactcccctgctccaagcagaaacgcagggagcacccaaaagaaaatataactaatatttaaatttctgacagcacgttttatctgttcttccatgttcgttctaagtttctaaagattaattgattatacagttccggtaaaaagtgtccggttcacaatactacggcccagagtcacttcatccgcatattcgagttcatcccccacagatatgccgcgagcaatcacactcagcttaacacctagtttatccaacttacggtagatatagaaattagtggtatccccttccatagtagtgctcagagcgagaatcacttcctttattccaccttcggatacccgttgcaccagactttcaatttgcaggtcgctcggccctaccccgtccattggagaaatcacaccgcccaacacatgataaagtccccggtactgctgcgttgcttcaactgccattacatcacgaatgttctccaccacacaaatagtagaagcgtcccgctgcggattggcacaaatctgacatatttcggtatcggatatattatggcatactttacaatacttcacctcacgtttcaaagtaataatagaattcccgaaagcttccaccgtagccgtatcctgccgaagcagatgcagcacaagcctcatggccgttttacgcccgataccgggaagtttggaaaattcgccgactgccttttcaagcagcacggaaggatattgttggttcatagataataattgctattctatcgatattttggcgcaaagatacggattattgttataatacctacaaaaaatactacctttgcagccgatatgatgatacttgtcactattatttgctacttcgcggcattattactaatagcccgtatcaccggacataaaggcggatcgaatgcagcgttctttaagggagagaacaaatcgccctggtatgtagtctccttcggaatgattggcgcctctatctccggagtcactttcgtttccgttccgggaatgatacgcggaatggatatgacctatatgcaaacggtattcggattctttttcggatatatggttgttgcccacgtactgcttcctttatattacagactcaacctgacaagtatctacggctatctcggtacacgcatcgggacacatgcctatcgcaccggctctttcttctttctcttatcacgtatgctgggaacggctgccaaactatatctggtctgcctcattctccacacctatgtatttcaggaaatgcatatccccttctggctgatagccgtcggttcggtagcattagtatggatatacacccataaaagcggtataaagacaatcgtctggacagataccttgcagacattctgcctgattgcagcattgatcttcatcatctatttcaccgttcagaaactgggacttgatttcagtggtatcatccggacaattcaaggcagcgaacacagccgtatcttcgttttcgacgactggatatcccgccagaacttcttcaaacaattctttagcggtattttcatcgtcatagtgatgaccggtctagaccaggatatgatgcagaagaacctttcctgccggaacctccgggaagcaaaaaagaatatgtactgctacggattctcctttatcccgctgaatcttctgtttttatgcctgggaattttgctaatagccctagccggacagatgcaactggaacttccggcaatgaacgacgacattcttcccatgtttgccgcacaagggtacttggggaaaccggtattgatactttttacaatcggaattatcgcagccgctttcagcaactctgattccgcgctgacagccatgacgaccagtgtatgcgtagacctgctgaacacgggaaaagactctgaagaggtggcatgccgtaaaagaaagaaggtacatttctctctttctgttttattagccttattcatttgcctggtagaaatgctgaataacaaaagtgtaattgacgccatatacatcatcgcctcctacacatacggcccgctactgggaatgtttgccttcggtctgttcacacgaagacagacaaacgaccgccgggttcccctcacagctgtcgcctccccactgctctgctatgttttagactggtggatattcaaagaaaccggatataaattcggctatgaattgctaatgttgaatggaactcttacctttgcaggactaatgcttatgtctaaaaaagagaaaacgccgaaagcgccataaaaacaggtgctccggagtttattataaataatggcagagtttattataaacgacgcaatagtttattataaacgatgagcgagtttattataaacgaaattataaagaaataaatgacaagaaaatggaaataacaagtgcagaatttgtgattagcaatacagacgtgaaaaaatgtccggcaggtatcttccccgaatatgccttcatcggccgttccaacgtaggaaagtcaagccttatcaatatgctgaccgcccgcaaaggactggcaatgacttccgctaccccgggaaagacaatgctaatcaaccactttcttattaacaagaactggtatctggtcgaccttccgggatatggatacgcccgtcgcggacagaaaggaaaagaccagatacgtaccataatcgaagattatatcttggaacgggaacagatgacaaacctctttgtcttgatagacagccgtctggagcctcagaatatagacctcgaatttatggaatggctgggcgagaacggaatacctttttctatcatcttcaccaaagccgacaaactcaaaggcggccgcctgaagatgaacgtcaacgcttatttgcgtgagttaagtaaacagtgggaagaacttcccccctactttatctcctcctcggaaaaccgcacaggacggacagaaattctcaattatattgaaaacataaacaaggaaatcaattacaaatgaaaaagaacattgtatcacttgcctttatggcagtattcttgctaatggccactaacagccaggcgcagtcatggaaagacttgttaaataaggacaacatctcgaaagtagtaaatgctatcaccggaactcctgaaacgatcgacatgaccggaacatggaactacaaaggttcggcagtagaatttgaatcggagaatctgttgatgaaagcaggaggcgccgcagccgctaccatggcagaaaacaagctcgatgaacaactaagcaaagtagggatcaaggccggacagatgaatttcacattcaatgccgacagtactttcacaagtaccgtaggtaaaaaaacactgaaaggaacttattcttatgacgcttccgcaaaacaggtagacctgaaattcttgaaactgctgaatctccacgcgaaagtaaattgcagctccagctcattggaattattgttcaactcggacaaactgctcaaattattagcgtttatcggaagtaaaagcaatagtaccgctttgaaaacagtcagctcactggccgataattacgacggaatgatgttggggttcgagctctctaaataacaaaagagagtcgtttaatactatttcgcactccataaagtacattttaaggaaaaagcactacctttgtcacttgtaatcactaaaaagaaggaaaaatgaaaaaggtactttttttaatgaccttattagtaatgggagtaagttttgcatttgcacaaacaaatgccgacattaaatttgacaaaacaacccatgatttcggtaagttttccgaaaacagtccggttgtcagttgcacattcacctttactaatatcggtgacgctcctttggtaattcatcaggcagtagcctcttgcggatgtaccgtacctgaatatacgaaagaacctatcatgcccgggaaaaaaggcacgatcaaggtaacttataacggaacaggtaaatatccaggacatttcaagaaatcaatcactctgcgtaccaatgccaaaacagaaatggtaaggctatatatcgagggcgacatgacggccaaagatgccaaataagaaaaaataggcgataacataaaggagaatctttcggttctcctttttttttgtttactttgaggacgaatatataaaattgacacattagcaaattataaaactatgaaacaagaagaagacaagttcaccgggctacccgagaacgcgttcagagagttgaaaccgggagaagtgtacaacccgttaatggctccctcaaaaagttatccggaagttaacatctggtcagtagcatggggtatcgccatggcaatccttttctcggctgccgccgcttatctgggattaaaagtaggtcaggtgttcgaagcagctatcccgattgcaattattgccgtaggagtttccggagctgccaaaagaaaaaatgctttaggagaaaatgttattatccagtcaataggggcttgttccggtgtaatcgttgccggagctatctttaccctccccgccctctatattcttcaggctaagtatcccgaaatgaccgtcacctttatgcaggtatttatcagttccctgctgggcggtgtattgggtatcctgttcctgattcctttccgcaaatatttcgttagcgacatgcatggcaaatatccttttccggaagccactgccactactcaggtattaatttcgggagaaaaaggcggtagtcaggctaaaccgttgttaatggcaggaatgatcggcggattatatgactttatcgtagccacattcggttggtggaacgagaatttcacgactcgcgtatgcagtgccggcgagatgttggcggaaaaagcaaaactcgtattcaaggtcaatacaggtgcggcagtactcggtttgggatatatcgtcggattgaaatatgcttcgatcatttgtgccggttcattggctgtctggtggattatcattccgggaatgtctgctatctggggagacagcgtgctgaatgcatggaatccggagattacttctacggtaggcatgatgagtccggaagaaatattcaagtattacgccaagagtatcggtatcggtggtatcgctatggcaggtgtgatcggcattatccgttcctggggaatcatcaagagtgctgtcggactggctgccaaagaaatgggtggtaaaggaaatgtagagaaaaacattatccgtacgcaacgggatctttcgatgaaaattattgcgattggttctatcatcacactgatactgattgtgttatttttctacttcgatgtgatgcagggaaatctggtgcatacattggtagcaatcgttttagtggccggcatttctttcctgtttactacggtagccgccaatgcaatcgccattgtaggcacaaacccggtatcgggaatgacactgatgacattaattctggcttccgtagtcatggtagccgttggattgcgaggtccttcgggaatggtcgctgcgttagttatgggtggtgtggtatgtacggcactatccatggcgggaggttttatcactgacttgaagatcggttactggttgggaagtactcctgccaaacaggagacatggaaattcctagggacaatcgtttctgctgcaaccgtaggcggtgtaatgattatcttgaacaagacatacggattcacaagcggcgcactcgctgctccacaggcaaatgcaatggcagcagttatcgaaccgttgatgagcggtgttggtgctccttggttgttatacggtatcggagctgttttagctatcattttgactctttgtaaaattccagctttagctttcgcattgggtatgtttattcctttggaattgaacgtaccattggttgtgggtggtgctgtaaactggtatgtcacttcccgcagcaaagacgcagcattgaatacggaaagaggagaaaaaggaactctgttggcgtccggtttcattgccggaggtgcattaatgggggtaatcagtgccgctatgcgtttcggtggcgttaatctggtgaatgaagcatggttgaacaatacttggtccgaagtgttggcattaggagcatacgctttattaatcctctatttcatcaaagcttcaatgaaagttaaataagtaatatgcggagactgctatctatcataatatcgcttatcactgttatggcatttgcacaacagcccgttgaatcaacttcaaacgagtccgaccctatgctaagaatcggaaagtcttacttggggaccagatacgtggccaacacgttggaccggaacgaagtagagcaactggttatcaacaccaaagaagtagattgcctgacctttgtagaatatacactggcacaagcactcggttcttcttttgccgataacttgcaaaggatacgttaccgggacggtatcatcaatggatacccctcccgcctgcattatacttccgactggattgataatggtctccgcaacggttttctgactgacgttacagcccgaaacagttcccgtactacgaaactttctctttcatatatgtccacgcatcccaaacaatataaaaaattggctgattctccggaaaatgtaacacaaatggcagaatacgagaaagcattatccggaaaaactgtatcttggttgccgaaaagcgaattaccggaaaacggattaccctggattatgaacggagatattatcgctatcactacgaagcttcccggactggacatagcccatgtgggaatagcctattacgtaaacggaaaactgcatctgctgcacgcttcttccacgctgggaaaagtggttgtcagcgagaagcctttcaatcacatgttgaacaataataaatcgtggacaggtatacgtgttgtccgaatgtctcactctaaaaataactgattatgaaacgacttaaacatttccttctcgcctcatgcttattgcccggctttctggctgcgcaaggaggcgcaaacgcctactttctggaacttgctccggatgcccaatcagcaggtatggccggcacgggattagctatcaccgacaacggaagtacagctatctttcataatgcttctaccattgttttctcacaagaagtaatgggcgcaagttattcgtacgctgacataaacaaagattactcgatgcacagcgcatctgttttctataaaatcggaagagaagggaatcatggtttcacagtaggtttccgtcattttaagaatccgaagcaaagactggacggtgatcagaacgataacttccgcccgcatatatgggatctggaagccggatatttcagtactgtagccaagaacctgtccttgtctcttacattcagatatttacaggctaaagcttggaaggatgcggacaccaaaaactcggtttgccttgacttcggagcaacttatcaccgcaatatggctcttttggatgaaatggcttcctggagcatcggtttccaggctgctaacttaggaaaaaagatagacggttacaaacttcccgccaaactaggcctgggaggtgcaatcgacctgccattcagcatggagaaccgtctgcaagtggcactcgacttcaactatctgcttccttccgaaatccgccaacttcaggcaggaatcggcgccgaatataacttcctgaaatacggggtagtccgtgcaggataccacttcggagataaagacaagggagtaggtaactacggaacacttggctgcggaataaacttctggccgatccgtgccgacttctcctacgcactggcagacaaagactctttcatgcaccgtacttggcagcttggcattggaatagtattctaagttcaccctcgaggcgttgcttcacttcgtccataggcacatcgtgcttcaactcctgacgcagagaagtgacgcctttatcaataaacccgcaaggatgaatgtagctgaaatagcgcaaatccgtattcacattcaaggccagcccgtgcatagtgacataatgactactcctcactcctatcgcgcaaatcttacgggcacgagacgtattaccttccagccagacacccgtcgctttctccagacgtcccgcttcaatgccataagatgcgcagacacgtatcaccgcttcttccaacagatgaacatattccttcaatcccaaccggaactcctccagattcagaatcgggtagcaaactaactgtccgggaccatgataagtaatgtctccgccccggtcaatatggtaaagcgtagcatcaatagcttttagttgttcctcactcaacaacatattattttcctttccgctacgtcccaaagtgtagacgtgaggatgttcgcacataatgatatggttctcgtacggttctccttccgctttcgcacggactatcccgtcgaaccattccgtctgccgttgccatgcctcggcatacggtatcaaattccaatcgataaaaactgttttcataaaaacaaaggtaagaaataaaaagaaaatgtgtacatttgttggccgaatataacaaacacaactatgaaaatggattttccacaggtagacttacctactgaagtattagcatggacgaacgtcacggaagacattctgaatatttataagcaatcttgccgattgcaagcctgtattgtagccatatgtacggaggggtcgatgaaggcatcgattaacctgcttgattatgaaatccgtccgaatgacctgattacattactgccgggaacaatcatccagtttcgggaaagaacagaaaaggtatgtctttgtttcgtcggtttctccgctcattgtaccggacgggtcaacttgatgaaaaatattggaaacgcttatcctaaacttttagaacaaccggtggtaccgctttccgaagatgttgccggttatctgaaagactatttcgccttattatcccgggccagttgcaatgaaaacttcgatatggacccggaactggtagaattgtcactccagactattctgacaagtattcggctgatataccacaactatcccggagaaaacagcagctcaaaccgcaaaaaagaaatttgccgggaactgatccaatctatcaccgagcattacaaagatgaacgccgtgcgcaattctacgccgatcaattaggaatctccctccaacacctgagtaccacggtgagacaagtaacgggcaaaagtgtattggataccattgcttacattgttatcatggacgccaaagcaaaactgaaagggaccaatatgactatacaagaaatagcctattcgctgaacttccccagcgcttctttcttcggcaagtatttcaaacgatatgtgggaatgacaccattggaattcagaaacagataacttcataaaaagggagtggctaaatggaggctggctgaaagtcgggatggtaggtagatacacaatgctgataataaataatttatgtattcacctaccacctccccctacgggtactcctccttcctgaaggaggagaattttagatactatcgcctttttagtcagtcatttccctgtttgaaagaaaccgggccaataatcaaagacttcttcttcccagactcaacgaattaagtaccacgctcacactggaaaaggccattgccgcactcgccagcatcgggttcaacagcaagccgttcaacgggaacaggacaccggcagcaataggaatgccaatcaagttatagataaacgcccagaaaaggttctgatgaatcaactttactgtttgcttcgataattgaaaggctttaggaagcaacaacagatcggaagtcatcaaggtaaccatagctacatccatagcaatgtccgtccctttccccatagcgatactgacgtctgccagtgccagagcttgtgaatcgttaatgccgtcacctaccattgccactttctttccctgcaattgcagttcacgtataaattcggccttgtcgtcgggcaaagcgtcagctacaaaacgttcgattcccaaccgggaagatactgccaacgcagtacgttgtccgtcaccggtaagcatacaaatatcaataccctgacgtttcagttctttcaccgcttcggcggatgttgctttaataggatcggaaaccgcaataatagccaacagttcgttctcgcaaccaaagtaaatgataccattaccgtccgattcataacgaaccaacatatcagccattacatcgctcacgatagcaccgaaatctttcaggagtttatggctacctacccagtaagtacgtccctgataagacaccttgattcctttccccgtaatactttcaaagctgtccagcgtagcgggtttgatcttctcctcctcttggagtgcagcaacaatcgcacccgccaacggatgttctgatttcagttccgcagccagaagcacatttttgaaatgtggttcctgaggctgtgcccataaccagccggtagcggtaggatgcccttcggtcagtgttccggtcttatccaataccactacatttactttgcgcatctgttccaaagcaactgcatccttgatcaagatatgttgtccggcagccttaccgatacccaccattaatgcagtaggcgtagcaagtcctaaagcgcacggacaggcaatcacaagaacagacacagccgacattatcccataagacatatattcgctaccgccgataacaacccaaaggataaatgtcagaatagcaattcccagcacaacagggacaaagatccctgtaatacggtcgacaatacgctgcaccggagctttacttccctgagcttcctgcaccatgtgaatgatacgggcaagcactgtttcactacccacctgcgtggcactgataataaatgaaccacgctgattgatagttcctgccagtactttatcacctttcttcttttccacaggaatcggctcaccgctaatcatactttcgtccacatacgaatcaccctcggagagctgaccgtccacgggaatctgttctcccggacgaacgactaccaaatctcctacttgcagttggtcaatcaatatttcttcttccactccattacgcaatacacgggctactttaggttgcattcccattaacttgcgaatcgcattcgatgtatttcccttggcacgttcttccataagtttcccggtcaggacgaaagctataattaccgcagaggcctcataataaacatgaggttccagtccgcgggcataccagaactcagggaagaaagtattaaagagactgaacaagaaagcaatggacgtacttagcgcaaccaacgtatccatattgctccgtcctatttttgcctgtttccaggctcccgtgtaaaaaccgccgccgaaaagtaccaatacaggaatagtcagtaccaactgaatttcattagagtatggcacatgcatcaataccattgagaaaataagcaaagggactaccagaatccacgcaccgattaccttccgcttcagacgaagataacgcctatgttgttcctcctcctgacgttcttctttatgagcttcctctacaatcaagtcgtaacctgctgcaagcactgccgcacgaatctccccgggagccagtttatcgctctcataagaaacggttaatgtattggtagcaaaattgacagaagcctctatgacccccggcaacttcctgactgttctttctacattatttgcacatcccgcacaatgcatattgagcacgggaaaattcttctttaccatattattatctatatttataagagtttctccccaaccctctccaaaagagaaagctggggagagaccacattctatttataaaacaagcaaatacgggtatttgttcaattacttcttatccgcttttttatcgtctttctttgtttcttttacaaattcagcttcataattgaacttcttaaaccctgcctgcaagttctttacatttgttttatccgcgtcgtaagtgatagtgacgattttggttttcacctcagtcgacaagtccttcagccccttctcaaagcgcatattgtccttcactttcttttcacacttttcacaatgcatctgagccactttgaacactacaacacgaatatctttcgccaatacggcagtcacacccaaaagagccaccacgcaagtggctatccatcttcttgttttcatttttcttattagtttaaaattctatgattcatttttgatacattcttcttattcaccgtttcttgccagattgaaacgtataccgacataggcttttgcaccgtgcacaggtccccaaatcatggtagaatcgaaattatctccccaaggatttgctgcgtcaatgatcgggttcttctgcttgaagttcgtcagattctcgcctcccacatagatagaccagcgacggaaataacgagtcacctgcatactaagctgttcgaagctaccataacgacgattccatgagagttgcccgtccgccaattcgtaaggagcaggcattctgcccccgccattaagttgcaaggtcgcatcaaactgccagattcccaacggagtctgataagaagccgtcaacaatcctttatacttgccggttagtggtttctccattcgctgacctttataagtagtttgtgcgtccgtcaaccgataggctccggtcagagtgaaacctttgaagaaaggatagcttgcttccacctggaatacgtgcgaatacgaacgtccgtccagattataaaaagccacttcatgaggattactatccatatctacaacaacttgcttccggaaatccgtataataatattctgcgttgacattcagcgtcttaccgaataccggaatataagtagaaacactggcacccaagttccatgcttcttccatatccagatttttcgcaatctccaccttccggctactggaaagtaagtagttgttttctgccagcacatgatttgtacggtatcccttaccggcagaaagccggaagtgtacataatcattcggattatatttaagatgcgcgcgcggagtcacaaagaaaccgtgtttactgctataatctccccgaagaccggccattaacatccattggtcattcagattcaaggtatattgcacatacgcaccgggaacagcctctttatcagaagctttgagaggggtatccgcgttattattcaaacgataatgctgatcgtatgcgtcatagttaaagctcaatcctgcggagaaactattctgcggattaaattccgtttcaaacatcagagaagcgtatgtattagtctggtctacattatacaatttccgtccgtacatcgcatcctgattgtgccaggaagtggacagaatcaaagctagattcgtattcttctccttatcaaatatgtaagcgtttttagtgaatagttcgtagcgttccgtgtcaatcccgaccttatacagttcaccggagtacatatttccatgcgtggactgtccactgctacgggtctcggaaagagctttgaaacctgcctgaaaaacataatggtcgcccatatatgcccaacggttccagacattatactgttctacctgtggaatatccacaaatccgtcatcattgccgtcatgtgcttttgtttcattttcataatgcgccaataacgaggtactccaccgtttggtaagtttcaaagtggcatcagcattagcttcataacgattcgtggtacttgcaaaaaggttggcagatacccagtcggcctcaggtaattgcggctttttaaactccacattgatctgtcccgtaatagcttcgtagccgttctttacggaagaaattcctttggaaacctgtatactctgcatccagggaccgggaacataccccaagccataaggggctgcagccccacgatagttcgggatgttctccgtcaacatctgcacataagtccccgacaagcctaacaattttatctgtttggctcccgttgccgcatccgagtaactcacatccaccgaaggatttgtaacaaaactctctcccaaattgcaacaagcggccctgctcaactcggcactgcttatcatatcctcgttcatcacgctgttacgcagcttcatcgttcccaacttacggctgacgacattcacttctttcaattccactccgtcccggaggacaatctccaattcctgctttttactgtcaacgtggatcgtatcattctgaaagccgataaagctgaccaccagtatatggcttttcgaaggcttcgtaatagagaaggtgccgtctacttttgttgttactccctgtcctgtattcatccagaacacattagctcccggaacaggttctccggtactatcttttaccgtcccccgtacttgcgcatacataccggtggcaagcaacgagaacagtcctaatatcatatatttcattctttaagtaagttacttttgtgatacaaaattagcttataatccttgcaacttagttgcaatcaaacctacttcacttccactgtcagaagactgcggcaagcaaagtactgaaaaagaataaaatagtggctaaataatataggtggaatataacgccaacatctgccttgaacagataggtggcggcgaagaaggaattatatattcaaccggcttctccgtatacccaatgttcagcaaatagcagaactgctcacagaaaaggtcaaccaccggagctgcaacggtcagctcggtagcatggttcatcaggttcagcttatagatagtagccgtgcaaccttcgtttttacaatctttctttgaatcgcacgtatgagatttcttacatttgggacagcccgtagcacagcaggactgtactgtttcacaaccggcacaacaataatgaacaatagaaactcccgcccccgaatatataatcaggagggaaagaaacattgcagttatgtaggctagtcttttcatatccggagacaaagatagaaataaaaacagactataccagctgtttcgttcaaaaaagataataaccataaagcctaaagccgcattacaagaaaaaacagacagaatatttttccttttttattcgcaggattcgttattttcatctatatttgtcgatagtgaaagatagaacaattgtagaatttatagaaaaaacgagtatgaaaaaacaatatgtcagtctgcttgcgattatactttcggtaagcggctttttgttttcttgtcatgacaagatgaacaaaaatacaggtgcattgcaattcgacagtatccaagtgaatgaaacggctcacttgtttaatgatacagccaaaccggcatgtaacattatcattaactttgcttatcctgtcaaatcatcggatgatatgctgaaagacagtttgaacgcttatttcatttctgcctgcttcggcgacaaatatatcggagaaaaaccggagaatgtagtaaagcaatacaccgaaaattacatcagtgagtatcgccgtgacttggaacctatgtatacagaagatgaaaaggacaaagaagatgaatcttctatcggtgcctggtattcttattataagggtatagagagccacgtgcaactctacgagaaagacttgttggtatatcgcatcgactacaacgaatataccggaggtgcacacggcatttacatgaccacttacctgaatatggaccttaccctgatgcgtcccctccgcctggatgatatttttgtaggagattataaagagccactgaccgacctgatctggaaccagctcatggctgacaacaaagtgaccactcacgaagctttggaagacatgggatatgcttctaccggcgacatcaccccgacagagaatttctatctcagcagagagggcgtcacgttctactacaatgtatacgacatcactccatactccatgggccccgtcaaagtgacaattccattcccaatgttggaacatctgttaggcagcaacccgattttgggagagttgaaagattaaagccctattttcattaaaagaacgaacaccaatgaatatccggttgttattgccccgtgtgatgcagaaggatattcattttatatacatattttaaacttatcattcaaaaccaaagaagtggaaatcatactgaaatattttcctgatctgacggaagagcaacgcaaacagtttgctgctctatacgacctctacatcgactggaattcaaaaatcaacgttatctcccgcaaagatatcgagaatttatacgaacatcacgtacttcattcgttgggtattgccaaaatcatccagttccgtcccggcacaagcattatggacttgggtacgggcggaggtttccccggcattcctctggcaatcttgtttccggaaacaaaatttcatctggttgacagtatcggcaagaaagtgcgcgtagcaaccgaagtagccaatgcaatcggactgaaaaacgtaactttccgccatgcccgtgccgaagaagaaaaacaactgttcgactttgttgtcagccgtgccgtaatgcctctggcagatctgattaagattatcaaaaagaatatttctcctaaacagcagaacgcattgcccaacgggttgatctgcctcaaaggcggtgagctggaacatgagacaatgccgttcaagcacaaaactgtgattcaaagtctgagcgacagtttcgaggaagatttctttgaaacaaagaaggtggtatacgttcccatttaacagaatatccgttctgatttaatataaatcatagagaaccatgaaaataaaaagatttgagtttaatatgtttcccgtaaattgctacgtattatgggatgacacgaaagaagcagtcgtgattgaccccggctgcttttacgaagaggaaaagcaagccttgaagaaattcattcttaccaacgaactgaatgtaaagcatttgctgaatactcacttacatctggaccatatcttcggcaatccgttcatgctgaaagaatttggtctgtcggccgaagccaacaaggcggacgaatactggattgatgaagcgccgaaacaaagccgtatgttcggattccagttgcaggagaagccggttccgctaggcaagtatctgcacgacggtgatagtatcactttcggacatacaactctggaagcgatacacgtgcccggtcattcacccggcagtctggtgtattattgtaaagaagacaactgtatgttctccggcgatgtcctgtttcaaggcagtatcggccgtgccgacctcacaggcggtaacttcgacgagttgatagagcatatttgcagccgtctttttgtcctccccaacgaaacagtcgtttacccgggacacggtgcccccacgactatcggaatggagaaagctgagaacccattttttagataaaacaaaatcctcctattaatatgaaaaccgatttgttagctagccgtcacatcggcatcaatgaacaagacacaactgtaatgctccgcaaaattggtgtggactcgttggacgaactaattaagaaaaccattcccgccaatatccggctgaaagagccactggcattaaacgctcccctgacggaatacgaatttgggaaacacatcgccgaactagcaggtaagaacaaactgtacactacatacattggtatgggttggtacaacacgattactccggccgttatccaacggaatgtgttcgaaaatcccgtatggtatacgtcttatactccttatcagaccgaagtttcgcaaggacgcctggaagcactgatgaatttccaaactgccatatgcgaccttaccgccatgccgcttgccaactgctcactcttggacgaagcgactgcggctgccgaagccgtaagtatgatgtacgccctacgttcccgtgcgcaacagaaagcgggtgcgaacgtagtgtttgttgacgaaaatattttccctcagacattggcggtaatgactacacgtgccgtacctcaaggcatcgagctgcgtgtaggtaaatataaagaatttgaaccttcacaggaagtatttgcctgcgtattgcaatatcccaattcgaatggcagcgtagaagattacacagagtttacggaaaaggctcatgcggcagattgtaaagttgccgttgccgccgacatcctaagtcttgccttgctgacacctccgggagaatggggagcggacatcgtattcggaacaacacaacgcctaggcacaccgatgttctacggcggaccttcggccggctacttcgccacacgggatgaatacaaacggaatatgccgggacgaatcatcggctggtctaaagacaaatacggtaaactttgttaccgaatggctttacagacccgcgaacagcatatcaaacgcgagaaggcaacttcaaatatctgtacggcacaggcattgctggctacaatggcaggattctatgccgtttaccacggtcaggaaggtatcacgactatcgcttcacgtatccacagtatcaccgtattccttgataaacaattgaagaaattcggatatacgcaagtgaatgcacaatacttcgataccctgcgcttcgaactgcccgaacacgtttcggcacagcaaatccgtacgatagctcttagcaaggaagtaaacctgcgttatttcgaaaacggaaacgtagggttcagtattgacgaaacgactgatgtagcagccgccaatgtgttgctttctatctttgccattgctgcgggaaaagattatcagaaggtggatgacatccctgaaaaaagcaatatagacaagactgtaaaacgtaccacgcctttccttacacacgaagtattcaacaaatatcatacggagacggagatgatgcgttacatcaaacgtcttgaccgcaaggatatttcgctggcccaatctatgatctccctcggttcatgtaccatgaaactgaatgccgctgcggaaatgctgcctttgagccgtcccgaatttatgggtatgcatccattggttccggaagaccaggcggaagggtatcgggaattgattaataatctgagtgaggacttgaagatcatcaccggttttgccggcgtaagtttgcagccaaattcgggagctgccggagaatatacaggccttcgtgtgattcgtgcctatctcgaaagcattggtcagggacaccgtaacaagatattgattcccgcttcagctcacggaacgaatccggcatcggcaatacaggcagggtttataaccgtcacctgcgcatgcgacgagcaaggaaatgtagacatggacgacttgcgtgccaaagcggaagaaaacaaagaagaactggcggcactgatgattacatacccttctacacacggtatcttcgaaacagaaataaaagatatctgccatattatccatgcttgtggagcacaagtatatatggacggtgcgaacatgaatgcacaagtcgggttaaccaatccgggatttatcggtgctgatgtctgccatttgaaccttcacaaaacgtttgcttcacctcacggtggtggtggtccgggtgtgggtcctatctgtgtggccgagcatctggtacctttccttccgggacacggaatcttcggtaatgcacagaatcaggtttcctccgctccgttcggaagtgcgggaatcctgccgatcacttacggatacatccgtatgatgggtacagaaggactgactatggctactaaaatcgcgattctaaatgccaattacctggctgcttgtctgaaagacacgtatgggatcgtttatcgcggagcgaatggtttcgtcgggcacgagatgattctggaatgccgcaaagtgcacgaggaaacgggcatctccgaaaatgatatcgcaaaacgtctcatggattatggttatcatgctcctaccctctccttccctgtgcatggcacgctgatgattgagccaaccgaaagcgagagtctggcagaactggataatttcgttgatgtcatgctgaacatctggcaggaaattcaagaagtgaagaacggtgaagcggacaaagacgacaacgtattgattaatgctccgcatcccgaatacgaaattgtaagtgatcgctgggagcactcgtacacacgcgaaaaagcagcttacccgatagaaagtgtacgtgagaataagttctggataaatgtggcacgtgtagacaatacactgggagaccggaagttattgccgactcgctacggcacattcgaataagaagaaacggtcacagagaaaatcatcacaaataaagtgatgaaaaactaataaaacaatcccggggcttacacttgttatgctccgggattatctctataaagcccggactcttcacctttcttcccagggctaaacacacaaaagtcccgggcataatggaaatatacccgggacttatatattcggaaatgcctacttgacaatagttatcgtaccgtctttcacctttttctctttcatcgggattttagaatcagcatatcccaacgctacacaaccgtaaactttatgattttccggaacgcccaacgaagtaataaatgcacgtacctcaggatcgtcacacgtcgtcccgagctgatttatccaacaagaaccgatccccagagaatgagccgcaagaaacatattttcgatagcacaggcacaatccatacccgcccaccactgagtcggctcattggaaacgataaccaaagtaggagcatgataatagcaacaatacgtcttgctctgcccgcgttccttcaaacggggttcgtcgctcttggcaaaagctcccttgatacgttcattcaattcggtcagtttatcggcattctgaatggcagtgaaatgccatgtctccagatgcatcccgctcggcgcataagtagcagcctccagaacagcctgcaaatcctcttccgagacctgctgaccggtgtaagcccgtacacttcgacgtgctttgatattctctaaaatttcatttgtcttcatactataatttatttaccgtttaaccaaaccaatctttgcattcagcttgaaataataaactccgttctctttctccaaaaagccatatttatctttatccaaagagcccttttccaaacgagtatttcggaacaggaagtcttccatgacctgcttctccgatttatgataacaaagtacttccccgtttccacctaccagcaaaatgccttcaacagccgaatcctgaccattgtatatctttgccggacgcatccccaaagccagagccattaagaattgctttattttaaactcatagaaacaatgtttgtttatcaactcatcttttatcttcagaggattcatctgcttgattacttccgtcaattcactgattcgggagatgccgtccaaatgcataatacgaatcatctctgtcagtacacgcggaaaatgtaaatcaatcatcagaagattactgcggaacacacggtcggctacatccgaatatttgagcacaccgcccaaacgctctatcagcatcattcgctcggatacttcgttgggggattcgggcaatgcattaatcttattcaccgtaggagtagcaaacttgattccactctgctccagtttaagatttgccgcacgccctccgtccaataacggattcatggcactcaaccgcgaacgtacattgaaacctcttaccggagcttccggatgccaaaaggcaaccgagaaatctgtacgatcttctgtttttgcttccaaatcgaagataccggcttcgtccaaaaattcttccactccctccggcgaggtgacatcattttccgaggaggatttcactgcctgcaaaatcagatcggcaacaataccgaaatcttcacgcggcatggacttaacacccgtttctccctcaatacggactgattcttcttcaatataataccggcgcgttccgtcatgttcttcccgttgaatcactgcaataggccaggacatttctcctattttcgcttctgccgtgcctaatacaacttttccgtctgccaacaggcggaagaaagtataaagttcgcaccattctttttttgttgcttcaaatgccatatatcttatgtttcttatttactgattctgtttattattgactgataacctgcggtaatgctgtggacgccacaacgggaggttgtatatgggtaacttcttccaatgggggcaactttcctgcttgtgcataaagaggattacgtatccattctctcggagtaaccacaatatatctgcctgtccagcatccgtcaaaataagaaggattgccgacttgtttcttaatcggatagcggatattctcgcctttactccgcatctccggcgaacggccggggtcattcacccacacatatttatcatcaatgccacgcaatacgatccaatgtcctcgtggtccgggacgaagtccacgagttgctcctgtataccttacgtttatcaacacgggaatcccacggtcgatataatctttcagtatccggtaatctttctgttggaaatgttccgcacttatcatattctcataataacgggtcaatgaatctatttcgaaagaataatatcctccctgccctatcgatgtacgacgacggaagggagcacgtttcttaaaaaaatagttccgctgatattcaatcagtttcttttccgcatccgaagaggttcgttgcgcgtctgctgtcatgcctttgaaataatcgaataccattaatgaggatgcaagcgaacagtgtgtatagggacaacctgtgattttctgcgaataccagggaacaggtatgtcgtttggagcaaatttcaagttctcctgtgcctgtgtttcaatgccaaccaacacaagagaagcccaaaacaagctgaaaagtatattatatctgttcctcataaacatatttttcttatttatattctatctcacttccaccaacaatctctatcaaaattctcctccttcgggaaggaggagtctccgtagggagaagtgataggtaaatgtttcaatcagtcttcctcaagaatccgtgccgtttccactttctccagccgtgcacgcagtttcggcatcatggaagaacggatgcgcaatgtcatactgcaatccatatcatacgactgccgaagaatctccggttcttcttccttgacaatacgcatcacatcattcataaaaggatactcaaacatgattgtcacttcctcgtccaccgttttctcgatgaccgtagcagcagctattgcttcggcagcagcagctttataggcaacaatcagtccgcttgtccccaacttgattcctccgaagtaacggactacgataatcaggatgtctgtcagttcattggagtttatctgtccgagaataggcttgcccgccgttccggaaggctctccattatcattggcacggaaatctttgcgagcggctcccagcatataggcatagcatacgtgccgtgcatcataatacttcttctgatacgtttcaagatgagcttttatctcatcgagagtacgcacaggcagggcgatagcaataaacttgctccgcttttctgtataaataccttcggaaggttcggcaatggttttgtaagtatcttcagcagtcatgttgcaaagatacgggtttacacggaaatttcaatttatcgtttggaaatattaagcgatcagacaattgacgagatacgttcgggatgatacaaacaagcggtcgttttactacaaacgaacggttgattctttataaagaagcggtcgatccgttataatctaccgtatgattgtaacaaatcgaccgctctattttataaaatgatacttgtcttattccaatttatggataaccagtcccgaacgaagtttcggttcgaaccaagttgtctttggaggcatgatgttacctgtatcggcaatatccattaattgcttcatagacacgggataaagagctaatgccactttcatctcaccactgtctacacgtttcttgagttctcccaaaccacggatacctcctacaaagtcgatacgtttgtcggagcgtaaatctttgatgcctaagatttcatccaaaatcaagttggaggatatagtcacatcaagcacaccgatcggatcgttatcattgtatgtacctgctttagcagtcaaactataccattttcctccaagataaagagagaaattatgcaaaccggaaggtttgtaaatatccgcccccttttcctcaacaatgaagttcttgtttaaggcgccaaggaattgttcgggagttaatccattgaggtcttttaccacacggttgtagtcaatgatagtcaactgattggcagggaaacaaactgccatgaaatagttatattcttcatctcccttatggttcggattctgctttgccttttcagcacctaccaatgcagcggcagcagaacgatgatgtccgtcggcaatataaagagctggcattttagcaaattcggcggtgatagccgcaatgtcttcgctctggtcaataatccaaaaagtatgtccgaaaccgtcacccggagcgataaagtcatagacgggcttttccaaagtatatttcttgatgataacatccagtttatcattatcgggataagcaaagaatacgggttcgatattcgcattgttcacacgaacatgcttcatacggtcttcctccttgtcgcgacgggtaagttcgtgtttcttaataacaccattcatataatcgggaacatacgcaccgactaccaatccgtactgcgtcttaccgttcattgtctgcgcatagatataatagttttccttgctatcctgcaccaaccagcctttatcctgaaacagttggaaattctcggccgccttgctgtaaacacattcatcatgttcgtccgtaccaacagggaaatctatttcaggtttaataatatgataaagggatttttcattaccttccgcttctgcgcgggcttcttctgagttcaatacatcataaggacgtgaagcaacctgttcaaccaggttctgcggaggacgaatgcccttgaaaggtttaattattgccatgatattagtattttatttgtaaaaaattagagccacagacttatataaaatctgtggctcaaatatactacttatttctaaaaaagacgttctgcgacagattgtttttaatcagattataactatgttatcctgaaaatccgccttcctcattctgaatattatttgtttactctaaacttctcacaaccgtctttcagaaaaccgacaatctgttgagctgcagcaataccggcattgatatttgcttcggcagtctgtgcacccattttcttcggtgttgagaaataacgtccggcaaacttttctacaaattcagcgttagcagcaggcataatgtccgtaatgtatttgaagtctgcacggtcttccattaatttgataagttctgcttcattaattacttccttacgggcagtattcactagcatagcgcctttcggcatgtctttcagcaaagcatagttgatagagttctttgtttcggcagttgccgggatgtgcagagaaacaaactggcaagtcttgtaaagttctgcagcagaatcaagcgctttcactccgtctttctcgattacttctttcgggcagaatgcatcgtatgcataaacttccattccgaagcctttagcaacacgggctacattgcgacctacgtttccgtaagcatggatacccaatttcttgcccattaattccgtaccggaagtaccgttatagaagttacggacagcataaaccatcatacccaaagccagttcggcaacagcattagagttctgtcccggagtattcatcacacaaacgtcgtgagcagtagcggaagccaagtcaacattatcatatcctgcaccggcacgaaccacaatcttcaactctttcgcagcatccaacacttctgcatcaataatatcactacggataataatcgcattagcatctttcactgcatccaacaactgagccttatctgtatatttttcaagcaaaacaagctcatatccggccgcttcaatttctttacggataccgtctactgcaatctttgcaaacggtttttcagtagctacaagtactttcataatcaaattctgtttataaaaactcaccacagattactcagattctcacagaatttagaaatatctgtgccaatctgtgtaatctgtggtgacaatattattaatgaagtttttcaaattcctgcatgcagtcaatcaaagcctgaacgctctctttcggcatagcattgtagcatgaagcacggaaaccacctacggaacggtgtcccttaatacctaccatacctttttctgttgcaaacttcaagaagtctgcctccaaatctttgtattcaggagccattacaaaacagatattcatgcgtgaacggtcttccttggcagcagtacctacgaacaatttattacggtcaatttctgcatacagcatatcagccttttcaatagcacggcgttccatttccttcacaccaccctgagctttaatccaacgaagagtctgcaaagcagcataaataggtactaccggaggagtgttgaacatagagccactatcaatatgagtctgatagttcaacattgtcgggatatagcgggaaactttacctagtgcgtcattctttacgataacaaatgtaacacctgcgggagccaaattcttctgcgcaccaccatagatacagatgtatttggaaacgtcaatcggacgtgagaaaatatcagaagacatatcggcaatcactggaaccggagaatcgaggtctttcttcaattccgtaccgtaaattgtattatttgtagtgatatggaaataatctgcatcaacagggattgtgtaatctttcgggatataagtatatgtagcttcggctgaagaggcaacctctacaacttcaccaaaacctttggcttctttcattgctttctttgcccatacaccggtattcaaataagctgcttttttttcgaggaaattatagggcaccatgcagaactccatactagcacctccacccaggaacaaaaccgaataaccttcggggatattgagtaattccttgaataatgcctctgcctcgtcaaccacaggttggaagtctttggcacggtggctgatttccatcagagataaaccagagccgttgaaatctaaaatagccttcgctgtatcctctatcacctcacgcggaagaatggaaggtcctgcattgaaattatgctttttcatttgaagtttgtttttggtttaacaatttcgttactttttgtctttcgactttgcgaatttacgaatttattttcggcgtacaaatctttccttataaaaatactgttttatagcagatttctcttactttttattggtttatacaggatatatacaccatattgttatctatacatatcaagttaagaataaaagtcgaaaatatcactctatgaaatcaataaattataaagtgaaagagaaatgagataaaaatgaatatttataaagaaaaagttttttttctacttcgcttcttcgataattgtcttcattcctttgatcttttctccttggatcaaattcagcaattgtttcaccttagcccgacgaacggcaacaaatgcataatgctcttttacatcaatagcccctacatcttcacgagccaaatttccttttttatataagaatccggcaatatctatccggcttaatttttctttctttcctttacctatatatacagtagtccagacagatttaggaggacgagaagcattttccggtaatgccactgtttctatattatccgggatataagtcggaagtttttcctcagcgtgaagcaccagataagaagttccggttgcatcccaacgcgcggtacgtccgttacgatgcgtgaaggcttcttcgttcacaggaaggtggtaatgaatgatatgctcaatttccggtatatccagcccacgggcagcgaggtccgtagagataagcacatgacaactaccgttacggaatttatacaaagcacgttcacggtccggctgctccatgccaccatgaaaacgttcggcaaataacttcttttcagccagaagcttatgtacccggtctaccgcatctcgatgattacagaaaacaatactagaactacttcccagtgtacaaagcaaattatataaagtatcaatcttgtctttcgagggagaaatcaccttcattaatgtcaggcgggattcctgttcttcagaagcatccggcaggaaattcagtttcactgtgcggttcaatcctgtaaactggggaatttcttctgcatcggtagctgaaagcagcatacgtttcttcaatcccggaagttgtgtgataatctccgccatttcatcatggaagccaaattccagtgatttgtcaaattcatcaataatcagtgtatggatcgtttcgggattgaagtttcccttggacaaatgatcggtgatacgtcccggagtaccaataataatagcaggatgattgcctagaatactctttttttcttcagcaatagggtgcccaccataacaacaacaagttttccaagaagtacccattgccttaaatacactgtctatctgtaaagccagctcgcgcgaaggtactaagattaatacctgcacactaccgtcatccgttttcaaagtgagcaataatggcagcagataagccaaagtcttacctgatcctgtcggtgacaacagtatgacgtctttttttcctgtagcttgttccagcgatgcttcctgcatcgggttcaactcctcgatcctcaagttacgaagaaccgattgtataatctcatttttctctaacatgtggcaaagatacaaaaagagtaagagtatgaagacaaaaagacggtcaaactttagccattccagtcagtatatagcgacctttcaggttattctccttcatataaatcgtaacttctacccgacaggctttcatcagatcatatccggttaaacctgcattcatagctttgataaacgaatactccgtgtcgtcgtgaataaaagaaatacgatgatattccataacaaaatgtatttagggaactattatgtagtcaaaagtacaaaattaatagataagtagatgcaaaaacagataactatcttcaaaactgacataaaattcaccaaatacatcccgaaaagacacaaaagaaggcgggaaatctgagaagcataatcagcattcagatttcccgccctgtttttatataacctttccggtagtttcccaaccggagggtatttttcgaagattatcctccgaagttatcgaacatcaagttctgggctggaacgccaaggtcatcaagcatcttttcaacagctttcgacatcgggccaggaccacacatataatattcaatatcttcaggagcttcgtgattcttcaggtaagtttcatagattacgttgtgaacgaatcccggagtatacttcacaccggcagcatcagcagcaggatccggacggtcaagtgccaaatggaatgtgaagttcgggaagtctttttcgatttgcaggaagtcctccagatagaatacttcgttcaacgcacgggcaccgtagaagtaagacatcttacgatcggtaacgtgcagtgtcttcgtcaagtgcatgatttgtgcacgcaacggagccataccggcaccaccaccaatccacatcatttccttgttagaatccaagattgggtggaaatctccataaggaccgctcataataaccttgtcacccggtttcagcgtgaagatataagaagaagcgatacccggcattacatccataaatccgggaccttgttctttcggtttgaacggtggagtagcgatacgtacagtcaacatgatacggtcaccttccgccggatagttggccatagagtaagcacggattgtttcctcatcgttcttacacttcaagcccaacagaccgaatttctcccatgcaggcagatattcgtcaccaatcaggctcttatcgatatccttgtcatagtccattgagaatttaggaatcttgatctgtgcataagaaccggggatgaagtccatgtgttcacccttaggcagagcaacgatgaactctttgataaatgtagccacgttcttgttggagataacttcacactcccactctttcacaccgagcacagactcgtcaatcttgatagacatatcacttttcactttcacctgacagcccagacgccaatggtcttgctgctgtttacggctaaagtgaggaacttcggaaggcaagatttcaccgccaccttcaagcacctggcatttgcactgtccgcaagagcccttaccaccacaagcggatgacaggaatatcccgttgacagacagcgtattcagtaaagtagaaccggaagccacttccaattccttttcaccgttgattgtcagtttcacgttacctgacggtaccagaaattttttggcaaccaacaggataacaacaagcagcagaataaccacaaggaataccccaatgctcgctaatattaaattcatatccattgtcttattcctttctttttagatgttcaaaccagagaaacacataaatgcgattgccattaggcctactgtgataaacgtgatacccaagcccttcaacggagcaggaacgtcagagtaagccattttctcacggatagcagccagacctacgatagccagcagccaaccgataccggaaccgagtgcataagaaagcgcgtcccagatatcaccaatgtacttcgggtcactcggaccgagattgatgcgttgctgcataaacagagaagcacccatgatagcacagttaacggcaatcaacggcaggaagatacctagtgaagcgtacagcgacgggctgaaacgttccaccaccatttccaccaattgcacaataccggcaataacggcaatgaaaagaataaaactcaagaaactaagatcgacaccttcaatgatagcgttggcagccagcaccttagtttgcaacaagtagttcaccggaagcgtcaccagcaacacaaaagttacggcgatacccagtcctacggcagtcttcacattcttcgaaacggccaggtatgaacacatacccaggaagaatgcgaatatcatgttgtccacaaagatagagcggacgaataaacttaataaatgttccataattcttttttgaatcttgaattattaattactttcttcttgcaactctttgtggcgcgcacgttggtaccagataatgcaagctacgataatcaatgccataggcggcatcaacatcaaaccgttgttaatgtatccggtgttttgaataggttcgtagttcaatatattgaaaccaagcagtgtacccgaaccaagcaattcgcggaagaaagccacgattaccagaatcttggcatatcccaaaccattaccgacaccgtcaaggaaagactcccaaggaccgttctgcatggcaaatgcttccagacgtcccataagaatacagttggtaataatcaaacctacataaacagaaagttgcacgcttacatcataagcaaacgctttcagaacttcactcacgatagttaccaaagcagctaccacaaccaactgaacgatgatacgtatacggttaggaatggttttgcgaagcaatgaaataacgacattagcaaaagctgtaatcactgttaccgaaagtcccattacaatggcaggctccagttttgcggtaacagcaagtgcagaacagatacctagcacctgtacggtaaccggattatctattcccaacggagcagagaatacttctttatttctctttgaaaacaattgtcccatattctttatatctcctccttaattatttagttaaaaaactcatataactgctcaggcaagctttcaacatagcgtccactcctactgaggtaattgtaccacccgaaataccgtccacctgatattcaggtttctctaccttgccattctttacaactcccaaagcgatagaaccgtcttccaatgttttcttgcctacgaattcattctggaaatgttcggtagcaatttcagcacccagacccggagtttcactagcatgagagaagtaagtaccgtaaacagtatccttatcttcgttcagcgcgatgtatccccagatagcgccccaaagaccggcaccgtaaacaggaacgacatatttagtctggccgtccacttcgcacacaaatacgtgcagacgttgttgttcttttgcttctttctcgtagttggtagcaaattcgccagtattttcagtcagcgtaccgtctacgttcatcagcatatcaccttttacatatttctgatattctgcatccgcatcttctacattcttaatgttcaatgcagcaagaatctgctttttagtgtccaactgcacattcttgttttgtgtttctctcaatgaagagctaacgaatgccagcaggaatgccacgataacaaccattaccgaagcataaatgatagtataactattactattcgtattcattttcattcggtatttattggttagacttgatagcacgtttctcgcggcgactgatatttccctgtactacacagtagtcaatcagcggtgcgaagatgttcattaacaggatagcgagcatcataccttcggggtaacccgggttcagaacacggataacgatcgccatgacaccaatcaggaatccgaaaatatacttacctctttccgtacgtgcggaagtaacagggtcggtagccataaacacggcaccgaagcagaaaccaccgagaacgaggtgttcgtaccaaggcatttgcgccattgtattgttttccatgccgattgcgttgaacacccaagccatgaatgcaccaccgacaaacacagaaatcatagttttccaactagcaacccccgtccacaaaaggataacggcaccaatcagaatagcaatcacgcttgtttcaccgatagaaccgggaatcagacctgtcaccatatccatgctgaactcaggcacagtacctgtcgttgcagctaatcccagaggagtggcaaccgtaagtccgtctaccgcctgtcccataccgaaaatagtgtcgccggatacccaaacggcatcaccggacatcttggtcggataagcgaagaacaggaatgcacgagtaatcaacgctacgttgaaaatgttcatacctgtaccaccgaatacctctttcgcaaagataacagaaaatgcagtagctacggcgagaatccacaacggacagtcaaccggaacaatcatcgggatcaggatacccgaaacgaggaatccttcctgaatttcttccttcttccattgagctacgatgaactcaatgcccagacctactacataagatacgattattttcggcaacactgccaggaatccgtagataaacatttcgaagaagctgcctgtggcacctgtatgagtgaaatgctgataacctacgttgtacataccgaacagcaacgccggtactaacgaaataaccacaatcgacatgatacgtttgctgtcgatcgcgtcgtgtatgtgcgttcccgttttcgcagtcttgctgggcacgaacaggaatgtttcgaagccgtcgaacaccgactggaatgcgtggaatttgccgccctcttcaaagttcggctttatcttatcgagataatttcttaacgctttcattaatatatttactattttacgatttacaatttacgatttgccatgcgggcattgattatgccatttcagcacggagcatgtcgagtccggcacggacgatacgttgcagttccattttcgaagagcagacgaattcgcagagagcgaagtcttcgggagccacttcgtagatacccaacgcttccatacggtcaatatcaccggcgatgatagctttaatcagatattcgggcaagatatccattgggaataccttgtcgtattcacctgacataatcatatgacgttcgccacctttgatgcgggcatccaacgtatattcttttttgcccattaaccagctaaaataagagcggttggcactgaactggttgaaacgcggcataatccaaccaagcatttcgtgaatgtcgtcaccttcgggaattacagtcagctggctgtcgaaagctcccaggaatccgttcggtgatacctgttttccgctcaacacattaccactgatgtagcgcagatccttgcctgtcgttacatttccggcaaatacgttagtcagcaacgcacctacctgaagtttgcagtaagcaggtttcaacacttcggaaccagtcacagctactgtacgggtgaaatccacacggcctgtattaaagagacggccgataaagataactgcctgcgggtcgatcgtccacacagtctcacctttggatacgggagcgatgtgattgatttgaacacctacgttaccggcagggttcggtccgtcgaatgcagtaattgtaacgttcttagcctgagtcagtgcagtagcgttttgttttacgctgatactcaggtaagtttttgccattttggcgagagcatcgagtccggtctggaagtttgcttcttctcctttcaaagcaaattcgaagttgggagccagcggattggtgtcgaatgcagatacgaagattcccttcggggtaaccgtcgggtcggcgatgatgtcataaggacgttgtttgataaacgcaaaaataccggcttccaacaaagcggttttcacagcatcagcatccattgaggcaacattcttctttccaaattcttcgtagtcctgttcggcagccgcctctactacgatgtttaacaccttgcggcgagcaccacgttcaacactcgtcaccacgccactcacgggcgaaacaaatttcacttcaggatgatacttgtcgataaacaagggtccaccagccatcacatactcctgctcttttacgactaccttcggcgtcactccaggaaaatcatcgggtacgagtgcgtaaaatcccggttctttcactgttgcgtacgtttcagcagctttacctttcaggtttatgtcaaggcctttacgtaactttattacatttgccatgctatataaaataatggtttcataaatttgccgcaaaagtaataaataagattgggattcgtgaggaaaaaagaaaggaattacggaaaaatatccgcaattcctttcgtggtcgcacacaatattctttagagtgcctttcttttgttctcaaaaagaagaaaaagactattcttctccggcaaacatcgggtcccaggcagggagacgaatcggtttctgcttgagtatttcctgtattttggaagacgcatatttcgtttcaaccaccagacggaacatatattcgtcaaaccattcgtcagtcatgataagatgcccctgataaccggaagcaggtccccaactattctcaaccatccatttggtcggttttccattttcatcgaggtcaaccgccataagagtcatggcgtgacttgagccgctggcaaagctttggatacgttctttcttgtccatgccgaaagtggtgcccataagagattcgtagtcgtagtttttaacatccagcaagccacggtcggagttgaggaatttgccgacatcgcaagagaaatacatcatcgtactgtctttcagagaggcgattgccatttccttgatatcttcaacgggtaggttgacgtatgtccagttcttgccgtcgtaacggtggcggtcatagtcgatttcgtagcatttgtagtattcgcggctgggatcgttcattagcataatgtagttgctgatgaggttttcgtcaccatacttcttcaagaaagacaacggggtataattttcggtagaaacaagcttaccttgggcattatactcagtccatgtaaattctgtgggaggaacgcccaagttcagaacgagcaaccggtagatagtgccgagcatttcagttttcgttttctccagagcagctggtttagcgcccttagcagccatatcgcgaagctgaatcccctgttcgcgaagcttcagggtgatcagaccggccatgcgggaagtattttcactactgttcgtttccggcattacatctttgggtacaagaccatatttacttacaatgtcggctaccccggtgaaagttccgccgtcactcagaggattacggaaaagccattccaccattttgtcgttcatcggtttgtcactggtgtcgatgacaccttgcaggaaaaggttcgctttctccagttggtcgaagaaaaaaggataagtctgagagaactcaaaagaacccagatgatacttgtcaatcgctttggcacgcatcacgttcagccccgtaaagagccagcaacgtccggatgatttctggttcgtgatacctttggagttcactttaactgaaaagtgcgtgtccattcctttcatgttatcctgattgagagccagtttgcggatgtcgttgctgccgatagcgttgcggatagctttgtcggcagacgtattctggtaactctgtttgatttgctgcatcatagcgtcactgatgcctcctttcgcgtcttgtgcctgtgccgagtagcagagggcacagaaaacaaaaactggtaagattcgtttattcattatagataattcgttaagttactttgccggtatgctaatagatagacgtgtcgtgtttatgtttgccgcaccggatattagcatattggcaaattggttttacatatattatttggcaaaaatacaattcttttttagatttattatctatgaagatgaaaactaatcgaaataaaagcgttttctttgcagtcagattccaagaaagaatatgaaaagatatataataggtatgtggttggcagttctgcccatcagctttacattagcccaaacagatcgcacgatagtaaaaaacgacgaagtgcaaggttctatgaattcaatgtctgctggtgaaattctcccgacagataccactcccaccctttccaaacgtgaactacgacgtgaacgtgtagccaagagaaatcttcactataatatattgggcggtcccagttacacaccagattttggcttgttggtaggcggtagcgctttaatgacattccggatgaatcccagcgatactacccagcggcgttcgatcgtccctatggcgattgccctgatgtttaaaggcggtctgaacctgatgaccaagccgcagcttttcttcaaaggtgaccgtttccgtatcttcggtaccttctcctacaaaaatacgattgagaacttctatggcatcggatatagcaccaacaaagactatcctcgcggagaagacaccagcgaataccgttacagcggcattcaggtgaatccgtggtttctgttccgtctgggaaaaagcaacttctttgcaggccctcagattgatttgaattatgataagatcacgaaacccgccgccggaatgatcgagcaaccttcgtatattgcagccggagggacagagcacggatacacaaatttcagttcggggctcggattcttattgacgtacgacacacgtgatgttccggcaaatgcttaccggggaacatatcttgattttcgcggaatgatgtatagcaaagtattcggaggtgatgacaatttttaccgtttagagatcgattaccgtcaatataagactgtcggcagacgcaaggtggttgcctggacggtacagactaagaacgtcttcggagatgttccactgacgaaatatgcactcagcggaaccccttttgatcttcgcggatattatatgggacagtttcgcgacaagtcctctcatgtaataatggctgaatatcgtcagatgataaacacggacaaaagcacgtgggtgaaaagaatgctgaatcatgtaggttatgtagcatggggaggatgcggattcatgggtcctacgcctggcaagatagaaggtgtgcttcctaacctcggactggggttacgcatcgaagtccaaccccgtatgaatgtgcgtctcgactacggcagagatatggtgaacaaacagaatttgttctatttcaatatgacggaggcattttaaccggtaatccgcgcacaattaacaagaaagattgcaaaatagataataaaagactgctcataaataaaattaatccttatatttgcgcaagctataacacagcaagagcaaataatatgatttttttatgaagcaatttatatatcttttttcgggattactacttttgtttgcctctaccccccgtgtagttgcgcaagaaatcggcgactattctcaactgaatgacgaagattatagtaagatagatcttcctcccctgtccgttctattcgaaaatgccaaaaacaatcctatctatgagttggcagacgctaaaacagcaatagagcgtaaattattacaaaaggaaaaatgggcatttctcggcttcttcagtttgaggggaagttatcaatatggtatgttcggcaacgaatctacctatacagatgtggcgatagctccctacctcacctattctactcaggcgcaaaacggttatacgctgggggcaggtgtcagcattccgttaaatgatttatttgatctcaaaggacgtgtcagccgacaaaggcttacactgaaaagcgcgcaactggagcaggagatcaaatacgatgagattaagaaaaacattattgagatgtatgccatggccacttcgcagataagagttcttcaaatgaaaagtgaaagcctaattcttgccaatgtacaatacgaaatatccgaaaagaactttgccaacggaaccatagaatcggccgatctgtcaacagataaagaaagacagtcacaagcccgtgaagcatacgaaaagagtaaatatgagttaacaaaaagcctgatgatactcgaggttatttcacgtacccccattatacgaaaataaaaacagaagatatgaattttgttatctctaccatacagactttattccgccaccggtggttattgctgattggaaccaccctcttcactctatcagtcatctattatacacgccacatgcagggcggatatgatgtaaaggccactctgtacaccggggtcgcttcaggatataatctggaaagtgacaagcggacagactgggctaccgtacaaaattcaatggacaatctgatcagtatcatgcaagctgaaagtacactaaaacgagtgtgcctgcgactatttgccagagttcttatccaaggaaatccggacagggaaaccaatggtattactgtttccagttataccaccacatataaccatttaaaaaacagtccgaacgggaatgaaattctaaagctgatagacaaatcaagcgaagacaaaacagtctccaatctggaaaaatatatgcggccgcataaagagaactatatttacggcctgttttactatattcatccgttttatagctataatgccctgaaaaatataaaagtacagcgccgcctgaccagcgatctgctggacatcagctactcatccagcgacccgggtatcgcatacaacacagtaagtatcttaatggatgagtttgtggaagaatatcgccgtatccgttatggagagaccgacaaagttatcaaatactttgatgaagaactgaaaaggatcgggaagaaacttagtacagaagaagaagacttaactaaatacaacgtagaaaaacgcgtcatcaattatcttgatgaaacgaaggaaatagccgctatcaacaaagaatacgcattgagagagcaggacgcaatgtttgcattaaacagcagcaggtccatgctcgacgaattagaacggcacatggacagtaacgccaaacagataattaaaaacatggagtttgtcggaaaaataaaagaagcttccgatataacaggaagaatctcggaggtcgaagcaatgtccgattccaataataaagacattactgctctcaataacaacaagaagcgattgagtgaacttaaaaaagagctaagcgaactgacagatgcctatgtaggacataaatacagcaaagaaggtgttttgcgaacaaacatcatcgaccagtggctcgaacaaaccctgttatatgaaaaggccaaagccgaactgctaattgcacagaactcgcgccaagagctgaacgagcgatacgtattctttgcaccggtaggtactacgatcaaacagaaagagcgtatgattaactttaccgagcgcaactatctaaccgtattgcacagctataacgaggccttattaagaaagaaaaatctggaaatgacctccgctacactgaaggtgctgaatgaaccgacctatccgatctcgccccattcaactaaccggaagcaaatcatcatagctgcgtgtataggcagttttttaataattgttgccttattgctgctaatagaaatgtttgacagaacattgcgggatgccgatcgcaccaagcgagtgacgggatataaagtggtaggtgctgtccccagcctttcgacttcccgctacggaggactgaccaagacctacgtgcaacattccgcaagtgagctgaccaattcgctgcttcgttttctgggcaaacgaaaatctccgggtgtattcatcatcaatttgttcagtatcaatgaagattccgatgaagaaacaataggcaaccttgtctgcggatatatgcaaagccgtatgttgaatacaagatttatcacccacggagtggatttcaacaccaattccactcaatatttgttagctaagaacatcacagacttctacactttacaaggagaagacatcctgatagttgcctatccgccgttatcggagagcagcatacccagtgcactgttgcacgatgccaatgccaacatcctgatagcttcggcgaatcatggttggaaaacattcgacaaacagctttgtgaccagcttatggtccagctgggaacaacagatgttccgttccgtatctgcctgaccaatgccggacggggagcagtagaagatttcaccggtcagctgccaccgtatacgttattacgtaaaatcggttatcatctcagccaattatcattaactgaaaaaatcatattcaacttcaagaataagaccaaagaagtagaagacgaagacgatgaataacaggatagtaacttttcatattctgcttgccgcacagtttgcactggttgcggcaaacattataatgaatatcaagataggtcttttttccatgatatttatcttgttgttaacgactacttgcctgatacagcttaacaatgacgagcaaacaaactggaagcccggacgaaacataatgacatatttgtttgtagcctggctcctattctatttcctggaattactgaatcccaacaatgtaatagaggcatggaatatcaacatcaccccatatacactcataggcctgatatgtgcctttatagttccgataatcattcgtaccaaaaaagacatcgaactgctactgatcgtatggtctgtattcgtcatcatatttacaatcaaaggatattggcagaaaagccatggtttcagctccaaggaccttcattttttattttcaatgggaggtgcccgaacccatatcatctggtcgggcatccgctatttctcctgctttacagatgcggcaaattacggcgtacattgcgctatggcaaccgtcgttttcaccattagcgcatttttcgtagactcaaaatggaaacgcatctactttctgtgcattgcaatgggagggctctacggagtgggaatctccggaaccagagcagccatgggagttatcatgggcggaatgctgatgataaccattttggccaaaaattggaaagcgctgttggcaggcatctttgtctctatcggagttttttgttttttctatttcactaacataggaagcggtaaccaatacatccataaaatgcgttcttctttccacccaaccgaagacgcctcctacaatgtgcgtgtcgagaatcgacaaaggatgaaagaattgatgataaagaaacccattggttacggtatcgggctgtctaaatcaggccatttcaattcaaaagagcagatgccctatcctcctgattcatggttggtcagtgtatgggtagaaacagggattgtcggactgattctttatctcggcatacacggcacccttttcgcctggtgctcctggatactgatgtttaaggtacgcaataaaagcctgcggggactcgtagcggcctggctctgcatggacgcaggattctttatagccgcctatgtcaatgatgtgatgcaatatcccaaccagttacctgtctatataggctttgccctctgttttgccgcaccgcatatagacaagcgtatcagtgaagaagaaaacacccaatcagtatccaccccagaaaccgacgagtaaatatgacaaacaatattccggagatatcctttatcacgatctgctataacgggttcaaagacacctgtgaactgatagaatcattgcaaaataaaatacattccatacgttatgagacgatcgtggtagacaatgcatcacgtgaagacgaagctgccaaaatacgtgaacgctacccctccgtcattgctatccgcagcaatgaaaacaaaggattctccggtggcaataacataggcatccgagaagcaaaagggaaatatatctttctgataaataatgacacatacatagagcaggatacagtctcttttttgatagagcgactcgaaagccgtgcggaaataggaggtgtatctcccaaaatccgtttcgcttttcctcctcagaatatacaattcgcagggttcactccactgacccctatcacactgcgcaatgcaggcataggtttcggttgtccggacaacgggacattcgacaccccacatcccaccccttatctgcatggggcagctatgctggtgaaacgtgaagtgattgaaaaagtagggctgatgccggaaatattctttctttattatgaagaactggattggagcacccatataacacgtgccggctatgaattatggtacgaaccgcgttgcactgttttccacaaagaaagccaaagcaccgggcagctaagtaaattgcgcacctactatctgacgcgtaaccgcctgctctatgcctggcggaatctggaggggagcaaccgctggctttctatcatttaccagacaacgctggctgccggaaaaaacggactgtcttttttattaaaaggtcggccggatctcttaacggctaccataaaaggtatatcagcattcatccgtattcctcataaaaaagaacaaaaatgataaccatactacacattgcagaaattatactctacataatcctggccttcaacacaggttacctgttattgtttgccatagcgtcaaaattctgccgcccccgtatctatcctcgcacggctcccgggaccaagtttgccgtgctctttcctgcctataaagaagacaaagtcattatccccgccatttattccttcttacagcaagattacccacgggaattatatgacattatcgtgatttccgaccagatgcaggaaagcacgaacgaagctctgcgacaattgcctgtccgtctactgatagcggactataccgacagttcgaaagccaaagcaatgagtctggcaatgaacgccaccgcagacataccatacgacgcagtggtcattatggacgcggacaatactgccggtacaagttttctatccgaactcaaccctgtttttcagtcaggagccagagccgttcaggcacaccgcaccgcgaaaaacaccaatacggatattgccgttctcgatgcggccagtgaagaaatcaacaactcaatattccgcagcgggcacatcgcactcggactgtcttcggcccttatcggttcaggcatggcattggaagcctgttggttccgccaacatatacacctgctcgaaacggcaggagaggataaggaaatggaagccctcctgctcaaacagcgcatccatatagaatatctggaacacgtctacgtgaaagacgaaaagacccaaaagaaagaaggaatcaaaaaccagcgcaaacgctggatagctgcccaatttgactcattagtacgggcacttcccgactttccaaaagagctactgcgcggcaatatagactattgcgacaaagtttttcaatggacactgctgccccgtatcatcctgatcttctgcacattttttttcaccatactagtcaccctggtttccccctattcaagcattaaatggtggatactcgcttttgctttatttcttgcactgtttacggcaatccccggacatttactgaacaagcaactcttacgggcaatcttccagctaccgtccttactgctcggcattgcaagtaatctgttcaaattaaaaggagttaacaaaaaatttatacataccgagcatggcaattaacgtattagaagtaatcagacaaggtcaggtaggtggtggcgagtctcacctcctcgatctcatagcaggattcgacaaccgtgtcaatcccattgtcctatcattcacaggcggacaaatgattgacgcgctcacacaaagaggagtcaagtgccacgttgtcaacacctctcacccatttgacgtacgcatcacccggcagatcaaagagctgattctcagagagaacatacaactgatccatgcccacggaagtcgtgccgcatccaatgtcgcttttatagcccggaagctacacatccccatggtatataccgttcacgggtggagttttcaccaagaccagtcgtttttcatcaaacgtctccgggcatggagtgaaaaaataatatgcaagttgagcaaaaaagtaatctgtgtctcggaaagtaaccggattaccgggcagaaaactttcggattaaaacattcgatcgtcatagaaaacggcattaacctgacaaagttcaacccccaccgggagttcagcaatctccgcaacgagttcggatttaccgacgaggatttcgtgataggctttgtgggcaggatcaccttgcagaaagctcctttggacttcgtaaagagtatcgctcttgcacggcagaaagacaaaagaataaaggcgctattagtgggtcagggtgacatggaagaagagactaaagaagcaattcgcctgtatggaatggaaaaatacatccgaacctcaccttttcgcagtgacgtaccggatgtattgcacgctatcgatgttttttgcttacccagcttatgggagggactttccattgccctgctcgaagctatggcaatgaaaaaagcgttggtagtaaccccgacagacggtaccaaagaggttatcactcaccagcaaagcgggttaatagtagacttcggcaaaccggaagaattggcagaatgctatttggcttatcttcatcatcccgaatggaaagaagattacggagtcacagctatgtccaccattcaggaacgtttcaatagccggcgagtatcacagcaggttacggaagtctactatgacattctccgatgattacctccattccttcgtcacatcgaagcacgggcaagccttcacccattcctccggctcgatctccccgttcccgttcaggtcggggctcaagtcccggtgtccgcagatgcggcaaccgggatagtcgcgcaacagcatgaggatgagcacattcatcgaatgaatctgccattcagtgcgggtgtcggcaggacgtccgtggcagtcgaggccgccctcatagcaaataccgatactattcaggttgtgtcccttggcgtgcgcacctatccgttcaatctcccgcgtcgtcttgatgctcccgttcttacggatgtaaaaatgataccccacaccgttgaaaccacggcggcggtggcacacctccaaatcttcttccgtgaaatccctgtccgccctagtggcggaacagtggatcacaatcaggtcaatcttcctcatcaacctgtcctttcattcttctaccttttctctttctgcgaaagaaaaacaggatttccaatacaacatctaagattttgtcaatcatcgcttctcattttttataaattagttatcaactagatagacggatccggagtcaccccgccaccggaaccgccctctcccttgccgggctcctcggaaccggagccacctccttctccttcggaaacggccttcttctcggtatacaactcgaacgacacattattctcccctccacgcgtagtcgccgtgctgtcgttggcaaggcgcagcgaattgtcaaccttgaaacggagattgacacgagaaatattcttcaccgtgcagtccttctcctgctccacaccgggacaggtcagcgtggtgtaaaaaatccccagcccgtccactttcaccttatcgcctgccaccaagaccttcttcatcgcacggacgaaagatttcatgacgtgcgacacatcctccaccgaaagcgacccgattgactcgatttcacgcgccagcgtctcgattgaatagattttcgcctctccggacttgagtttgagagcatacaccattggcgacttctcatctccaattcgttttctgcgcttgtagcgcaccacagttactgttgccataatttaaaattttgttttctccgaaaggaaggacattctccctttctgttggtgaaacaaagatacggcaagacaccggcgacttgccggattgcaccgggttacacctgattacaccggattaagaaagaataaaggagattaaaagagactggagagggaataaaagagattgaataggaaataaaagagactgaaagctctttatcagatttggaaacaaagttaattaggaaaataatagccagacagtttatagtcgatagtatctgcaactctcctccttcgggaaggaggggaatggggatagcgacgacttatgaaattcgcagcaaatttgaagaagaaccgataaaaaaaactatgcccggcatttgcgcatctcagtaaaaaagcgtaactttatagcaataataaacacgttttaaacaccgaattaatgaaagcaaaacccaataatttttccgcagaggaagaagaaaaaacattccaataccgcagttacgggaaaggcgaacttgcctcactctacctccccaacatcacacagcaaagcgccgtagagcgcttcaacgaatggatagacgccgccccgggactcaaagagcggctgttggccaccggcatgaatccacggagcaggcgatatacccccgcacaggtacggctcatcgtcgaagtactcgaagaaccttagaacagctccttctctggaagccagcaagagctgtcatagacggtgttccgggcacgttgctccggcgggacggcagggtcgtgagattcttcgcaagggagataccgcccgttgacggggtcgtagacgaaagttgccacaccgcccacgccaagatgcttgaatttcactttatccacatagacacgggtaatgccgatttccttgtcgcgctccaccacaattccatagtcagccttgttgtaaaagtcggcagagccgttgatgtcgtacatttccacacgcggagtagccccggttgtggggttgcggttcatcttgcgcgggtgggccacgaggatcaggaggcagttatattgcgtggcaaattccgtaaatttattcaacaaattagagatatattgcgtctccgtctgtcccggtgcaggttcgtggtcgaagcggttgagcgggtcgaagacgaagatgcggcaaccacggcggacaacgagttcgcgggctttggcaagcacacggtcgggggtggcattgcctttcagggagatatgggagacgttctcggcgagaaactcctcggagcgtgccagcagtccctccgtcatgccgcagccgttctggaaacggtggccggtaagtttctcaatcagtttgcggagatgatagacgatagggatgttctccggactgaagaagccaatcttccactgatgtcgcaggcagagacgcagtactagttcgtccacccattccgattttcccgcgccgggcgttccggtgacgatgatgttgcggcggcgttcgtaggtacagattttgtccatttcctcccaccccgtttcggcaccgggaccgaagccgttgtcgaaaagagcccgcaggtcgccgtgcaggtcggcagcggtgaaaatgccttcgaggggaacttccaccgcttgttcgatagcgatgcggagactttcgaggccatatttgacgagatgttcattggcgtccttgcagtccggcccgtaggcgaccacgcggcaacgctcggcaccgaggcggttgacaagttcgtcgcgcaggcggattccggcggaatcggtgtcgacggcgatgatgatttcttccaagtcctcgaagtgggtttccatgaaacggtcgagccatgagaggttggaatttgcaccggccgggacggaaatcacgcctttgaatccggcggcaatggaggaagctgcgtccaattcgccttcgtggatgatgcaggaagtttgcccgataagggagtcgatgttgtaaggaatcagttcggcaccctgcaccattttgaaatgctttttcccactgcggaatttcgtgttcaccagttgcccgccttcaaaatagttgaagcagacacaacgctccttcgcgccgaactgcggcataaattcctcctgttccgtgatgcgtaattcggcgatgacggattgcgggatacagcgcgtttcgaccagccaacgttccgtggcgtcggaaagggtggttttcgaggcgtcgaacacaggacgctgaaaatgttgcgggatgacggctgccacacgacgcttacgagccgcctggcgctctgctttctcacgttcttcggtgtcgtcggggacgtagaagtcggctccgcaatggtagcagtggcaatggccggtgtcgatgttgacacgcagcgaacggtcacgcttgttgtgccgcgtaggtagacattgattacagatcgttttgataactccacttgtgcggtggcggatatctacttggtaattggcaaaatttctcattgtttttctaattaattttatcgtttacaggaagtttgatatatcaacaatatctcagtcagggctgaccgaaaagacaggctgacaagtcggtggtatctacaactctcctccttcgggaaggaggagtacccgtagggggaggtggtaggtgaatgcataagtcggttattatcagcattgtgtatccacctaccaccccggctttcagccacccctccttccccgaaggaggggaatgggaatactatcgactaggaggcaagcatccaaaagaggtagggacggaggacgatgcaaagtgtgagcggaggactatcgcggagctatcacgaagcgtgggcaaagctatcgcgaagcgtaggcaaagccaatgtgcaacgtgggcaaagccagtgcaaagcatgagttaaacaggtgtgatccccctcctcacgtccgttgacagccggggttaatgtccccacttcttccgcacatcgtcccacactgcggctgcatccggacgcagcggtgcatcgtccgggataaggtgtcccaggtacatcctccgaccgtttgaaagagtttcaaaacgattgtcggctgtgcttcccgccttctgaagtaccgacaataacgtttcacgcaacatccggcaggtagtagaccccggtgcgacatagttggaaaaataacgtcggacatcctcaagaaacagcaattcacctccttttccgtagagcagaatatgctgtttgaaaagttcgataacctgctgctgatgctcgagaaacagcttccccagtcccgagtgctgacctgccaactccatgtacgaccgggaagcggcaagctgatccaccaacttctcccacggaagtactcgctgcaacggaatctctccggcttcgtccaccgaaacaatcttcatcccgccaacagcctttttactcgcagcaaccgcttttcgaccttcaacagatgccttgtacctctcagcagccactttcttaccctcagcagccaccttcccactcgtagcagcagcaacagcagcatctcccggcacctcgcccgctgtattgctgctgttgttcacaacaggaacaatactcttgttctcttctcctctcttctcttgggtttcattcggttttccgcctttgccggcgggcgtttcagcgcgttttttagtctttctcggacgaccgccttttttgccgttttcggcatttatccgccatttttcctccaatgttttcatcaccctgtccagataaggagcgcgaaacatttggcgttcctcatccacctcaaaaagatcgaactcgcggagtatcctccctatcaaatccacatccacatcatagcgtttggccaaggccttcaacggcagcggtctgcatgacgcttcgtaattgtccttcgtgcgcaaatgcaacagcaacatcacataaactccgagagcgtttgccgctcccaactccaacatcataccggcaatattgtcgtcattcaacaaatttacctccaaattaaaatactgatctttcttcattatcgtagttatttacctatatttcagcttctaacagaaacggaggcaaaggtgaatatttttttttattccgtatgtcgcataaacgcaacacaacatatctttttttatcagaactttgcaccattaattctaattatttatacagacaatgaaacaaaaacgtaactacacgctaacggagcaagaagagaacaaaatagtaaatcagatttataacaaaaaaattttgttaataaagaaattacttgagacgtgccatttgaccgtcatggacttatgtgtacatcttaatatcgacacatctactttccaccgttggttccaaccgaatccctgtatcatcagtgccctcaaatacacacaagtctgtgtcttctttggacaatatataaaagagaaaaaaatccctcttacgaaagaaattatcaagctgatagaagaaacagaaccgttcagcatttttttattgtccgtttcatagcaattttggcatgaaaaaagagagagttatcatatcttttcatacctttgtagcacagcaaagcgaatcaatatcaaaagagaaaaacatgaatgacagtgaagatacaagcggttcgtcgataacagcgctcatcgtctttagagaaaacggagatgcgggcaatctgttcgtacctgtattgtgtgatgctatccgaatgacaggtgttgacgtgcgatgttccacaaaggaattctgggagtcggacaagacctatgacatcatccatttccaatggcccgaagaagtggtgggccggatgtgcgacgaccccggcatcgtccgccggctggaagaacgaatcgcgttcttccgttcgcgagggacacattttgtctatacccgccacaatgtgcgtccccattacgccaacgaagttatcggccgggcatacgacatcatcgaatcgcaaagtgacgttgtggtgcacatggggcgtttcagtctggaggagttcgtcggcaaacatcccgacagccggaatgccgtcatcctgcatcacatctatcagtatacttaccaagaggacatcagcgtagagcgtgcacggcaatacctgcaacttccacaagaagcatttatcgtcactgctttcggggaattccgaaactgcgaagagatacgtatggtgttgggagccttccgttcgtggaacgaaaaacaaaagttactgttagccccccgcctctaccctttctcacggcacaaccattacggcggaaatttcctcaagcggtgggcctcaaaaaccggatactacctgctcatgtccttgctcaaccgcgtgatgaagctacgcgccggtgccaatgacgaactaatcgacaattgcgacctgccttactacatggccgcttcaaatgtcatattcattcaacgaaaaggacaactcaactcagtcaatatcccgcttgccttcctctttcataaagtcgttatcgggccggattccgggaatatcggcgaattattgagaaatacgggtaatccggttttccgttccgataaaaaacaggacataatccgagcactgaaagaggcacgacatctgtctgcccggggaaaaggggaagcgaactacgcgtatgcgataagaaacatgagtataaacaaagttgggaaacaatacgccgaactctacgaagaattggcagacaggcatcaattcaactaattgagacaaagagttgagcccactattaacagtaaagaataaaaaaatccaaatgataaagatatgcttctattgtgactctatattcagtgttggaggagtacagcgtattttggcagtgatagccggagcaatctctgccaaacacgaagtgacaatactgaccctggacaaaccggaacaagaagatctcaatatgtatgaactgggacaaaggaatattcgtttccgccacatcagcctcccccctatcggaaaatgggaatatttgccctgcaaaacatacagttatttatacaaaaaaagaatcataccacaaatccctatcacctcacaatggtatggatatagctcattcccacacacacaacggaaagttctcatcggtgaattaaacaacgagaactacgacataatcgttggagtgcacgcttttctgtcactccaactggccagtatccgccaccggctgaaagcccgccgggtagtaggctggatgcacacctcttttaacgctttctttaacactccggggttctatctatatgagcagaaaaatcagttccgacatgaaatgacgaaactggacggaatcatcgtgctcaccaattacgaccgcggactgtacgaacgagagctgaacctctttcctatcgccatatacaaccccctttcgttgacaccggagggagaaggaagtccggcatacaaacgtttcctctcggtaggaagaatgtcacatctgacaaaaggttttgacatccttattgaagcgtttgctatctttgcacgtgacaacaaggaatggacactggaaattgtcggtgaaggccctgagaaacctgcattactgaaacaaatagcccgccacaagctggaaaacagggtaacaatttctcccttcacccgacaaatacaaaaacattacgcctcggcaagcgtatatatactgagttcacggtgggaaggattcgggctcgtcctggcagaagccatgagccacagccttcctgtcatagcctccgaccttccctttgtaaaagaactcctcaaggagaaagacaaccacttcatgttttcaaacggaaacatagaagaactggcggaagccatgactaaaataacagaacttccctcggaacggttaatccaaatgggaaaagtatcattagagatagccgaatcaataaaactgcccgccattatcaaacagtgggaaagttatctggagtacctaattaaagaaaaaacaaagtgacgaacaatattaaacagcaacttttttcgggagtattctatacagccatagccaaatacagcggaatcattatctcactggttgtggccggtattctggcacgactgctttcgccggatgatttcggaatagtggccattgctacggtcatcatttcttttttcgccattttcacagatatgggactgtctcccgccattatacagaacaagactctcacccaagacgacctgaccaacatctactcgttcacgttttggacaggcatagcggtcgctctgctcttttttatagcctcatggcccatttccgcctattacgacagccctatattacgcactctttgccagttgttatctatcaacctgttctttgcatcggtcaatatcgtgccgggagccttgttttacaaaaacaaggagttcaaattcattgctatccgcagctttgtcattcaaatcaccgccggcaccggagctgtcattgccgcattgagcggagcgggactgtatgctttactcatcaccccgatcgtgtcgagcatattgatttatattatctcattccaccgctatccccaacatctacgcatgacgttagggctatcatccattcggaagatcttctcttattccgtctaccagtttctattcaatgtcatctgttatttcagcaggaatttagacaaactgctgatcggcaaacatatgggaatgtccgacctcggatattacgagaagtcctaccgcctcatgatgcttcccttgcagaatatcacacaagtggtcactccggtgatgcaccctatcttcagtgattttcaggatgacaagatgaaactggcaacgtcctacgaacggatcatccgcttcctcgccttcatcggactgccgctcagcgtgttgctctttttcactgcggaagaagtgacactcattattttcggtaatcagtggttaccctccgtagctgtattccggatactggcgctttcggtaggaattcagatcatattgtcctcatcgggttctatctttcaggcagcaggtgacacacggagccttttcatctgcggcctgttctcgtctactctcaatgtggcgggaatagtgctcggaattttctacttcggcacacttacagcaatagcgggttgtatcgtaacgacgttcactatcaacttcgtgcaatgttattggcagatgtaccgggtgactttccggcggaacctccggccgttcgtacgtcagcttatttctccgcttgctgtaagcggattaatggtgttggccctcattcccgtgcagtacgcaatggagggaatgaatatttttgtgacaattattgctaaaggtattattagttttattatctttggaggatatatacaggctacgcacgaatttgacattatcggaaaagtgcgcggcatgacgagaaaagggaaataaaaagacagaataaacaatatacagagactttaaaaacgaatgaaagccttgttccttatcttccatggcttcgataaagcaaatggaattagtaagaaaatacattatcaggtaaaagctctcaaagaatgtggagtggatgcccgcttgtgttattatgacatcactcctcattgcgaacgccgtttgatgatagacaacgaagtcattgccgatttcgggacaggaaccacagcgaaagtgtggaaacgcatctactacgcccccattatcaaatatgcacgccgcgaaaaaatagaatttgtctacatccggtcggcccacaacgccaaccctttcacgctgcggctggtgaaacatctgaaaagtatcggcgcaaaggttgtcatggaaataccgacctacccgtatgaccaggaatacatcacccggtctatgaaactcagtctggccgtcgaccgttgcttccgccattcgttggccaagatcctagacggtatcgtcactttctctaatgccggcaggatcttcggagggaaaacgatacgcatctccaacggaatagattttgacgctatcccgctgaagcagaaccggaacaacacttcacatgaactgcacttaatcggcgtggcagaagtgcactactggcatgggttcgaccgactggttaacggactggccgaatactaccggacaaatccggattacaaagtctattttcacatcgtaggacctctgaccggcgaacgcgaacagggagaaatcctgcctgtcatccgcgacaatcatctggagccttacgtgattctgcacggacctctccacagcgaagaactggacgcacaatttgaaaaagcagattttgccattggcagtttagggcgtcaccggagtggcatagctcatattaaaacgctgaaaaaccgcgaatatgccgcacgtggattagcgttcacctattcggaaaatgatgatgatttcgactccgcaccgtatgtatggaaagctcccgcagacgaatcaccagttgacatcatgggactggtcgaatttcaacgtgcgctgaccatgacgccgcttgagatcagagaatccgtctatccgctatcatggaaggcacaaatgcaaaaagttatcaaagaagccggattcggatcactagaatagtattccccaataaataacaaacaatggttgatgaataaaaaaattaaaatagtctattgccttccttcgctttatataccggggggaatggaacgggtacttaccataaaagccaactattttgccgagaaactaggatatgacatatacatcatcctgacagacggcaaagggctggaacctttttacgccttatcgcctaaagtacatttgattcatctggatattaatttcaacgagctatggaacaaacctctgtacaagaagttattcatctatgcctgcaaacagcgtttatacaaaaaacgcctcacgaagtgtttgtttgaaatacggccggacatcaccgtatccatgctcagaagggaaattaactttataaactctatccacgacggcagcgtgaaaataggagaaatccatgtcaacaagtcgaatttcagagatcttgcagaagccaaaaataccggattcatcaaaagcagactttccagactttggatgaagcagttggatcggcaagtaaaacaattgtctaagtttattatcctgacggaagaggaccggaagaatttctcatcttatctggataataccaccgtcatctacaacccgctgcctttctatccggagcaaacgtcggactgcacggctaaggaggttattgcagtagggagatatgcgtaccaaaaaggattcgacttattaatagaaacatggagaatcgtagcccaaaagcatcctgattggaatttaagaatatatggcggaggagacaggagcgattttcttgccctaaaagacaaatatcacttggatacgctttatcttgaggagcaaacacccgacattatccggaactattgccggagttctatctttgtgctttcctcgcgctatgagggattcggaatggtcattaccgaagcgatgtcgtgcggtgttccccctgtttctttcacttgcccgtgcgggccacgcgacattattgacgacggtaagaatggcttgctggtagaaaacggaaatatagaaatgctggcagaaaagatatgttacttgatagagaatgacgaaatacgccggaaaatgggacaacaagcccgaattgacgtggaacgtttcaagatagagcagattgccgaacaatggaaacagttgtttgaaagcctcactttaaagaattgattatgaaatggtattcgaaatatttgcaggtttacgagcagccatttgcttcggcaccgccggaggtggtcggttttgtgaagaaaaagttgcggaagttatccgaaaacaagcaaccgctggcttcggttgttctcatttgccataacgaggaaacgcgtttgttgagttgtttgtggtcgctttgcgacaatgaatgtgatttcccgatagaaatcttagcggtcaacaacaactccacagaccgcacggaagcggtgatgcaacagctgggagtgacttatttcaatgaaaccaagaagggccccggacacgcccgccaatgcggacttaatcaggctaaaggaaagtatcatatctgcatcgatactgatacgatatatccttcccgttatataaagacgcacgtaaagcaactgatgaagccgggagtggcttgcacgttcagcctgtggagttttattcccgatgaacgccattccgccacgggactgtggtggtacgaagcattgagggatcttcatttgcgtattcagtcgatacagcgtccggaactttgtgtacggggaatgacattcgggtttaacaccgagctgggcagaaaattcggtttccggacagatattatccggggcgaggacgggtcactggctttggcaatgaagccttatggaaaattggtctttatccattccggaaaagccagggtcatgacaggatatggcactctaaataacgacggttcgctctttaatagtttcaaaacgagactagtcaaagcgttcaaaggagcaggcagtatgtttaccaggaaaaatgaatataaagacgaagataataatctgataaaaaacaaataaaacaaatgctattatgataacgcgtactccttacgatagagataacctgaaaataggcaagaaagacaaggtgttggaagtggggccgggacacagccctacgtttcgttcaaacgtgcttgtggacttatttgtagactctaactaccatagatgcgggaatctgaagatttatccacatcagcagtttattaatgcgaatggagaagctctcccctttaaagataaagaatttgattatgttatttgtaaccaggtacttgagcacgcggaaaatcctgccgagttcatccgcgaacaatgcagagttgccaaaagggggtatatggaaacgcccagtctgctgggagaatttcttttccccaagaaatcacataaatggattattctccacctggacaacaaactgattctttttgagaagtcgagaatgccgggaaactatgaaaataattatggtgaattatttctcaattatcttccttatcaatcactgacctataaattgttatggctcaccgaaggagacttgatgctgaaccggtgtgaatggaaagatgatatagaatttattatcaacccgaccgatgagaagtatactgctttcttcacccaaccgtggagccgacaaatggtagaacagatgtatccacgcagaagtgcaataaaagagatacaaaagatatggaatgctttcttttatatcataaaaaacaaggttaaatataagattcatggacatactccaatcagtttggaagaatatatgaggcttaaagaagaaaataagtaatatactgtctctatggctcttcttctaattttaagtggtaaagtgaattagtaaaaccccggaaaagaaggaggaactgaaaaaacgaatcaaataaacggttggcaaaaggcgaatataaacgatacgaaaaacaaataataatatagttatgaacggaagtcttactctttgtctcgaagttattttctggtttgccctgttcgtcgtgttctacacgtatctgggctacggaatcgtgctctatattctcgtcaaactgaaagagcttttcgtgaaaccggtgaaatactcattacctgcatcgaacgatgaattgccggaagtgacactgttcatcactgctttcaacgaggaagatgtagtggacgagaaaatggagaatagcctggacctggattatccggcggataagttgcgcattgtttgggtgacggacggcagtgatgacggaacgaacgagcgtttgcaaactcgctgggcaggaaaggcaacggtgcacttccaaccgctacggcaaggcaagacggctgccatgacacgcggcatgacactggttgacaccccgttggtggtctttacggatgcgaacacaatggtgaaccgggaggcaatccgggagattgtgcttgctttccggaatccgaaagtgggctgcgtggcaggtgaaaaacggattgccgtgcaagcgaaggacggggcggcagccggtggcgaaggtatttactggaaatatgaatcaacgttgaaggcgcttgatgcacggttgtattcggcggtgggagctgcgggagagctgtttgccgtgcggcgggaattgtttgagacaatggagccggacacgttgcttgatgatttcatcctttcactgcgtatcacgatgaaggggtatatcattgcttattgtacgaatgcttacgccattgaaaacggttcggccgatatgcgcgaggaggaaaaacggaaggtgcgtatcgctgccggaggattgcagtcaatccgcaggcttcgcccattgctgaaccctttccgctacggggtacttagttttcagtacacgtcgcaccgggtgttgaggtggtctgtcacgccttttctattgttcgcacttctcccgctgaatgttgcgattttgctgacgggcggctcgcctgtgttctacggcgtcctgttcgtgttacaggtgtttttctacggactgggatactggggatattatctgtctaccagacagataaagaataaattgctgtttatcccctattacttcctctttatgaatataaatgtcttgagaggaatccgctatctgaagaagaaaagagggagcgggacttgggaaaaagcgaagcgggcagaaaaataaaaacaaataatcaaatcttttgttatctttgtaagatgcaatagtcttaatcatctaatcgaatggacatgaacagaacattacatgatacaaataacgcgcaaaggatattgaaactgacagccgatacaatgttgttggtcgacaagaatggtgtttgcatagacattgatcctcattgtgacctatggttcttacaggatgagatacttctaggaaaaaacatatttgaactcctgcccgaatatacgcgggaaagggttgttcctgtcttccaatcggtacttgaagggaaaaagagcgtcagtaaaaacttcaaactggtactaaaggaagatgtttattattttaaatgtatcatgcatccttatgatgacatggtgctctgccagtatcgcgacatcacccaaagaagcaacgtgaaacgccaactggaacaagcgaaccgaacgctgcgagagatacagaaagtggcgcaaatcggtcagtgggtgtacaatacgaatgaaaacgtttttcattatctgggacataccggcgtgttgtgcgaagaaacggtacgaagcatttctttcgagaaatacagggagtatatcgttgaagaagaccggcagacgtttatcaactggaaacttagaaatctggagaggttcaatacggacagtatcagctaccgcgtacaggtgaacggagagatatattatatgcgtatccaggcttatctgcgtgaggaactcccggacggcagccttacgatcgagggatatatccagaatatcaccgatatccagcgccgcagaaacgatatcaatacgctgacgcacgctatcaacaacgccaaggagagtatctttgccgccagagaggacggtacgatcatctttgccaaccggcgttttctccacaatcacgggatttgcgagaatgtggatatctgtaaactgaaaatttatgatattgccgcagatatgcctacgcagaaagcgtggaacgaacgttgtaaggacatcatgcacggcggaagcagcaattttatcgctcatcatccttcgaaaatcaacagggatattctggcatacgaaggcacaatgtataatgtgaccaatgattccggagaagaaagttactggtcgtttgcacatgatatttccgaacgaatccggtatgaggcgcaaatcaagcgactcaacttgattatggatactactatcaataatctgcctgcgggaattgtggtgaaggagatcaataatgatttccggtatctctaccgtaaccgtgagtcgtacaaccgtgatctctgcgtcggtgagtcgatcggaaagaatgactttgactattatccgcccatagtggccgataaaaagagacaggaggatatacaagtggcaaccaccggaaagggattgcattggacgaccgaggggagggataaaaacggtaaccggattatcctcgacaaacggaaaatccgggtggacggggatgaattgtcctctcctatcatcgtcagcatcgaatgggatatcacggaactggagatgatcaaacgtgaacttcaatcgtcaaaagagaaagcggaaatgtccgacaagctaaaatcggctttcctcgccaacatgagtcacgagattcgtactcctttgaacgccattgtcggcttctcgcaacttatcgccgaaagtaatgatgaggaggaaaggaagacgtattatggtatcgttgagtctaataatggtcgcctgctggatcttatcaacgagattcttgatctttcgaaaattgaatcgggaattatcgaatttaccataggacctacaagcctgcacaacttatgcagggaagtacacgacgctcatattttccgtatgccggtaggcgtgagcctcgttcacgagccttcggacgaaagtctgatgattgaaacggacaagaatcgggtgttccaggtgatttctaatttgattggcaatgccgccaaattcacgaaagaagggagcattagttatggatacaaacgggtcggcgaccaaatcgtttttcatgtgaccgacacgggcacaggcatcgaaccggaaaaggtgggacgtgtgttcgaacgttttgccaagctgaataatcatgcgcagggcacgggattgggattgtctatctgtaagtcgatcgttgaacgactgggtggaaagattaccgtcaactctgaatttggagtaggaacgacgtttaattttacgttgccttataatattataaagaaggttacggacacaacagaaggtatgcaatcttcactgtcttcgcagtcctcacaactttcgcagtcttctcaaccttctgacctgactgaacaaccctccaatgaaacaccacaggaacaaattcctgagaaacaagcctgcatcttgattgccgaagacacggacagtaactatgatttgctgaatgctatccttggcaagaattatcggttggttcatgcacacgacggtatggaagccgtcataatgtatgatgaagtgaaacctgacctcatcttaattgatatcaaaatgccgaatctggacggactggaagctacgaaaatcattcgcgaactgtctgccaccgttcctattgttgttcaaagtgcatacgcttatccgcaagaccagaaagctgccaaagaagcgggatgtagtgatttcatatccaagccgatcgtgcagtcggaattgaaaaaaatgctcaataaatggctgtctccagaattaaataataaaatacaagagtgatataaacataaccaaggaaagatgaaagccttttatagactattttactacatctctattcttttatcgtgtatcctggcgggtgtcacaatagcaggagcatttaacggtactgcttcaccggacagtttcaagtttatgccttttatcggtttgggactaccgatacttttgttggtcaatctggcgtctgctgtttattggacgattcgttggcgatgctgggttttcattccgctaattgccatattcagtaattggggttacatcaactgtgttctccaattcccgcttctcgatccggcttccaaaccgacagtcaaagttaacgcatatactcccggagtgttgaccgtagccacttacaacgttgacgggttcaaccgcgaacacaccgggtattcatgtaaggagatcgctgcacagatgagaaatctgaaagcggacattctctgttttcaagagttcggtattgatgatgagtttggcgtcgacagtctatgtactgcgttgtctgactggccttatcattatattccttcttctcccgaaggacaacatcttttacaacttgccgttttcagccgttattctatcaaaaaggagcatctgattatttatcccaactccggtaattgtagtctctggtgtgatattgaagtcaacggtcgtatgatccgtctgtttaataatcacctgcaaactacggaagtgagccgcaataagcgcaaactggaaaaagaacttcgccaagacaactctcaaagagccaaacgtgccgcccttacgctcgccgacggcctgcatgagaacttccggaaacgtgcagtacaagctaatcttatcaatcaactggtgtctgcctccccctatcctactcttgtctgcggtgacttcaactcactcccttcttcttacgtttaccacaccgtgaaaggtgataaattgcaagacggctttcagaccggcggacacggatatatgtatactttcaaatattttaagcacctgttgagaattgactatattcttcactcgcccgaactgaaaggtttggattatttctcaccggactgggaatatagtgatcataatccggtggtgatgaggatgaagctataaaaggtgttctttgtaatgggactcaactagatattcagcaataaaaacaaaaaagcaactaaatcgttatgaattagttgcttttaattttcagttatactatattgtcttaattgaaaatataacgtacactaaactgtactgaataagtagatttaaaactttggaaatcacgataagtgcttgtcaatgtctcacctgcattcttattcatagtaaattctccgtttttatattgcaacaagctcgaattgattacctgcttataaagtccccaactgttgttcaataagttaggaaggtttttaatatcaactcctacttgcagcaagttacgctttccaccaacattcaaatagaaatcttgattcaatttaaaatcaacttgatgatgccatggcataacagctccacctctctcggcatacttacctttgcgattcttcaggtatttatcttggttaatataattccagaaatcatctctttgctccttagccggataagaagcagcatcactaaacttccagctatctaattcttcacgtgttgcaggaatatacaataaactattagcgcctgcatcaccaacaacattactagagaaagtatacgagtagcggctatatccccatgacccggaatatcccatctgcattccttcatacaacaaagaaacgctagtagcaaaatgctttccatattcctttttataaccgattgtagccaagatacgatcaggagctacataggtaccataacccaattcatgttcattgataccatttaccgaataagtattagtcttataggcagaagttacttggtcaccaataccatcactatatgaacgagattttgaatgtgtataagcaaatgataaatctaaaccaaaatcaaagttcttacgcaattgcgctgaaatagaatagtaataagcaccctttttccagttctctaaaagataaacattccgaccgctgttatatatcttataagtatcacgaacatcattgggagaaagagtcaattttgcctcttgcaattcataaccgcggttagttatcacaaccggattataatcacggctataaattccttccaaagtaaagttaacatctcccggcaatctcatatcaagagctaatgaggtcttccaagtagaaggcatcttcaaatctttatcaataattgtcggatctttaggaagctctacttttgaatgcgtctgaccaccatacaagtccttcaaaatctcatcacgatttgcatggaaatgaggtttatattgggcagtagcagcatccgtataataataggtagtttgtcccacgcctgaatttccgacagcagaaatcaaccaaacgaaaggcatacgtccaacaaacaaacctgtaccaccacgaagtacatacttacgatctcctgttatatcccaattaaaaccaacacgtggagatactgatactttcgcacccggaagttggtctgttgaataatgctgacctccaaaatctaatttggcaaattcttcattataattattctttaaagaagggtaagtcggtagttcaaaacgaagtccacctgttactttaaagttttctgaaacagaaacctcatcttgcaaatataaagaatattgttggaatttcaattctgcaaggaattgagacatatcaggtgaatttgaatgggttatagcaaaggccttcggagtctcatcatttacaaaatcactccaacttgaataaacatagtaaccagcacctcccagcatataaccattaatagcctttgtatgctcatattggaaaccggccatgaacttattaatacctacgttccagttaaactcatctgtaatggtgaatacttttgtctgacgcagattacccgcagtaaaaaggtctgcaccaaaattggcatatacagcaccatcctgcaaaatatcaactgttgggaaaagaggaccatcaaacgaacgaggctcatcttgataagaatatgcaaaacgtagcatattattcattgctccttgagccatacgagagttccattcacctgcaacagaagtaaaatcacgcacttgataatagttggaattcgaaaagctaagcgcatatttagaagtacgtccctgtccaggagcaatggtaccaacaggtttaccatctatgacttcagtggatgttcctcccggataaagagctgatgtagataatggactgactgaactggtagggaagttagaatctttggtatgtgtcttggtaaaacggaaactaactttattgttttgattagcattccagtcaacacgtgccataacacgataagcaggggtatccgttgaatagtcattatactttcccggatcaaaattatatttgtttagtaagaaaccacgcatatcatccatgtcactttggagagggcgatgtatattaccaccactatagctttctccaagtgcagtacgaggacgatagtttgatcccgctgttacattatcttcatattctccatttacaaagaagaataatttatcttttataatcggaccaccgaagcttgcaccataagtataatattgagctttggaacgtaaaagttcataatcatcaactttacttccttttagattctcattattaaaatacatataagcagttccacgaaattggttatctcccgaacgagttactgcattaattgcacctcctgtaaaaccgctctgacgaacatcaaacggggttacagctactgtaacctgttccaaagcatccaaagaaattggagagccgttagccggaagattacctcccaacccgaatgtattgttgaaagcagcaccgtcaactgtcacaaatgattggcgataattgccaccaccgactgcaaaaccattaccaacatcagcaccttgtggagaaagacgcataatatcgctaatactacgggaaatagttggggtgttactaatcatatcacgattagcattcataatagcacctgccctatcagacttcatgttactttctttagaagcagtcaccaccacttcgtccaacagttcagaactctcttttaaagaaacatttaaaacataattctctcctaataaaagattgattcctttgtaaatagctgtctgataaccgacataagaaatttctaccttgtatggtccaccagtacgcataccttgcaaattgaattgaccactaacattagtcacagttccataccgagttcctgaaggctcgtgaatggcaacaatagttgctccgataatcggttcatcttgtgctgtcactttaccactcatagtggctgtggtaacctgtgcactcattgtgactgtcattagcaacattactagcaccaaaaaagaccgcgttctttttaacataatgtaattgattagtttatactaattgtttgcttttaaaaactgtgcacaaatataattaatattatttagacttacgttacaattatactacaaaattttaagagagataaacgttttattgcgttataaaacaagaaaggctctacataacttgcagagccttttattttgaaacagaaagcattagaaatgcttcaatctattattttacactagtcggtcattaactttctataacgaacacgcttcggttcttcattccctaaacgcttcaatttattttcttcgtactccgaataggaaccttcaaagtaaaacacattggagtctccttcaaaagccagaatgtgtgtacaaatacgatcgaggaaccaacggtcgtgtgaaatgacaactgcacaacctgcaaagtcttccagaccttcttccaaagcacgcagtgtatttacgtcgatatcattggtaggctcatcgagcaacaacacgttaccttcttctttcaaagccattgctaggtgcaaacgatttctctcaccaccggagagcacaccacaaagtttttcctgatcggctccggagaaattgaaacgagaaagataagcacgtgcattaatatcacgtccgcccatacgaagcaaatcattaccaccggaaattacctgataaacactcttgttcgggtcaatgtctttatgctgctggtcgacataggctacttttacagtctctcctacttcaaattcacccttatctacggtttccagtcccataatcaaacggaaaagtgtagtttttcctgcaccattcggaccgattacgccgacaatgccattcgggggaagcacaaaattcaaatcgtcaaacagcagtttatcaccgtatgctttagccacatgtttagcttcgataactctattacctaaacgagggccattcggaataaagatttccagtttttcctccttctctttcacgtcttcattcaacaacttgtcgtatgaattaaggcgggctttcccttttgcctgacgagctttcggagccatacgaacccattccaactcgcgctccagcgtcttacgacgtttgctcgcagttttttcctccatttccatgcgtttcgtcttctgttccagccaggaagagtagtttcctttccatggaataccttcaccacgatctagttcgagaatccagccggcaacgtggtcaaggaagtaacggtcgtgggttacggcaataacagtcccttcatattgttgaagatgttgttccaaccaatcgatagattctgcatccaaatggttggtaggctcgtccagcaacaacacatccggtttctgcaacagcaaacgacaaagagctacccgtcgacgttcacctccggaaagatttgccacagactgattttcaggcggacaacgaagtgcgtccattgcacgttccagtttactatccagattccatgcatctgttgcatcaataatatcttgcaattcgccttgacgagtaaaaagagcatccattttatcctggtcttcgtaatactccggcaaaccgaatttttgattgatttcttcgtattctgtcagtgcgtcaacaatgggttgcacaccttccattactacttcttttactgtcttcgtgttgtcaagatagggttcctgcgccaaataacctacggaataccccggagagaagaccacttctccctgataggatttctctaaacctgcgataatcttcattaacgttgacttaccggaaccattcagaccaataataccgattttcgctccataaaagaatgacaggtaaatgtctttcaacacatttttatttggagtgaatgctttgctcacccctaccattgagaagataatttttttatcgtcagcagccatatattaataatgtatattgttgataatggcacaaagataagaaaaatgtttgaaatcctttggagttataaaaaaatgttctacctttgcacccgcatttcgaaagaaagtaacaaggattgattcgctagctcagcaggtagagcacaacacttttaatgttggggtcctgggttcgagccccaggcggatcactagactaaagaataaacccctgataatcaatgattatcagggatttattctttagtctttctcttgatttcatcattacaagcggtagaagtcgtcgttgataagtcgtacttttaggatattcaggaaaataggtattatctattagcccaaattcagtgtagccaataccacaagccgaacaactgaccttaattattgaataacaaacggatatactaggaatgtcacaggctattagagaaagttttatgaaaataagttctttgtttgaagaacaagatgcagctacaacagatattccttttgttaagtatcctgattatgaaaatccgactgaagaaaatattagaatggttatcggatttaaatcagcaaaattattacaggggaaagatgatattactcctcggggaatgcctgcacaaagaacatataacaaactggctaatttatataatgagatatccgaatgaataaatgcaaacaggtataaaaccacagaaacatcaattgttttttattcattgactaatatggaatgacaaggtagctctgcaataaaagtagtgcccaatcctagctgagagtatacttgtattcgtccgttcattttatcgacaatagatttacaaatagataaccccaaccccacaccttgtgcaaaagagtccactttttcaaatctttcaaatatcttctccaacatattctgaggaataccacgaccggtatcttttaccccaattctaacgcaatgcttatctatttcataaaacacttccacatatccacgaatcgtattcttcaaagcatttgaaagaaaattattcaatatctgcttgatacgcaacttatcaagttccaccaaagcatcatgttccggataactggtcagaagttccacaccagaaggaagaagacgagcatattctgccacacactcatcaagaagctccgtaagattaaaccaattctgatgtaactccaaatatccggcttcaattttagacaaatcaatgatatcattgatcagattaagcaaaagttcgttattatgactaattaaagaattataaagctccttttccactacattttccgcactggccaacagacttgaaaaaccaacaatagcattcaacggagtacggatttcatgactcatattagccaagaaagctgactttaaacgatctgaagcttcagctctatcacgttcattaacgagcatttcttctatctgtttcaaatctgtaatatcataattaatactaatcaattctatgactttatcttggggtgcatattttctgacaaagagattaacatgcgtccatgtacactctccattctccctaaagacacgtattttatgacttaacttatcagcatttcctttttgtacctcctcaaaaaactgaagaatcaaatcacggtcatcaggatgaaaagatttatatgtaccaataatctcggataaaggagttccagactcttctcctatatttttataccaacttttctgtgcatgtccctgcttacttagaatattaaaatgagcataacccactttcgcatagtcacctattaactcaaaaaattcctcaaattcctgaatcttattataagcaaccgtagtctccgttttatcagcattaatcagcagataattaaccggattatgattctcatcatacaaagtagttactttagtcacaagatcgattgtaccttccgccttattattcgaataatattctcctaactttgagaaatcatagcgaaaggtaaagtccgcatcctcattattcctcaacctctccttcatctcttccgggaaaactggattctcgaaaatattgatgcctagaagttcctccttactatctacatgaaacaaatccaattctttatcattgaggtcgaccaatactccctccttattatacaactcaatgccaacaggcaaattcttataaatattatgtaaaagccgttcgctacgttgtaaagcctgacaagctattgcagtatccggtccgtcctgcatttctgcaatgccatacacaatcgtatttcccttatcatctacttctcgaaaacaaatcttactacgcatccaaactgacccttttggggtttttaataaataaacgacttccgacatcgactgtacatcgaaagagcgaaccgttgtcggaccttgttcttcattcaaaatacgtttattgaaatcctcaaaactaatagtccctgtttcatccaaattcagaatctcagatatatattcggaacaggtataacattccgttgccaaattagcttcccaccaccccatattggcattagccattaactttgataagaacacaaaatcttgttgtttgctcataattgatgaagtaaagacattatccattaatcatttcaacacattcacgagcacaaaattagatattacaggcttcccattctttcaaaatgacacttttttagcatattataagaagaatagccactaatacctactttctatagtattagtggctataacatttacaaatatttgcttaaatagtttttcgtatgattaccagcattttagaaggctaaataatcaaagtaaaaagatatgcttctattttctaattgattcgtaaacagtttttgccattattttggcaccttcttcattcggatgaattttgtccggaaagagttgtggtattccatccattgccgtatgaagatcaattatatccaacttgtttttcttggcaacttttttaatcatcggaataatttctttagaaataatatcatcattgatactttcattagcttggtatgccttagaagggtaacagagatagattttcggttgggcaggcaatgccttgaaagcatcaatcatagtctgtatatctttcgtgaagtcggctttatgtttccagttaaacgatttactgtcgtttgttcccagtttgataaccacaacattaggattgaaagctaatgcatcctgataagccttttcattcatataaggacgatcacccttattcagtaacgtgcgggcacttactccgaaattctttacccaataaccgtcacccagcatacgacttaaaacagaaggataactatcacgatcacgattcttaatccgtgctccatacgtaatactattgccaatacaagctacacgaacggcatccttacggggagctttgaaactacgtaaccatgaagtcagttcgttcaacatctcatccttataaaggaaaccttcacgaattccccaaccatgaccaccggaagggtaaatatgcagaacagcaggaacaccattcttattcagagccagataatagttcactccattagcgggcggaacagccttatcatcatcactataaacgataaaagcacgcggtgtttcttttgtcacttgcttctcattagaatactccttttccaactcagcagaagcatccttacccaaaaggctgttatgggaacccatgtgagtatacgacttatccattgtaattaccggatagaaaagaatctggaaatcaggacgaagttccggtttggcatgagtcgcgattgtcgatgcaagatgtccaccggcagaagatcccatgataccgatatctctcggattcagattccatacatcagcactgtcccgcactatcttcatggcagcctcggcatccgaaataggaagtgtacggtcaccattcggcatacgatatttcagaacgatcaatgcgataccctgtttgttgaaatacggtgcccaatcatatccttcgtggtctacagccaagtgcgaatatccaccacccgggcacgccactacagcacgacctgtagccaattccggcgccggaagaaatacgcgaagcgaaggttgttcaatatcaaaagggttcggagcattctgagctaccgcctgagaacctgtgaaccataaaagcaacaggaataaaagaatagaaaatttctgtttcatagtatctgtatactttgattaatgaatgatttaatgtgcgaagatagtaaatttatgtatctttgcgcctccttttaaatagaaaaagaaatgcaaggaattaaaaacctgacacacgggccaatcaatcgtcaactattcaatttagcaatgcctatcatggctacgtcatttatccaaatggcatacagtctcacggatatggcatgggtaggacggctgggtagtgaagccgtagcagccattggttctgtcggaatcctgacatggatgtccggttctatctccctattaaataaggtaggttccgaagtcagtgtaggacaatctatcggcgcacaaaatcaagaagatgcccgtcactttgcctcccataacattacgattgcacttatcatttctctctgttggggcggattacttttcatccttgcagaacccatcatctgtatctacgaacttgaggtacacattaccgccaatgcaatagaatatctacggattatctctaccggaatgccgtttattttcctttccgccgcctttacaggtatctacaatgccgcaggacgaagtaaaatcccgttctatatcggtggtgccggacttcttttgaatatcattcttgatcctctgttcatcttcggtttcggtttggagaccaatggtgccgcttatgcaacctggatttcacaagctactgttttctctatcttcatctaccaactacgtttccgaaaagactcactgctcggtggatttcctttcttcactcaattaaagaagagatacacacgacgtatcctaaaactaggattacccgtagccacattgaataccctgtttgcatttgtcaatatgttcctctgccgtaccgcctctgagcaaggcggccacatcggcttaatgactttcacgaccggaggacaaatcgaagcaattacctggaacacttcacaaggattctcaaccgcactcagtgcttttatcgcccaaaactatgctgccggacgaaccgaacgagtgctcaaagcatggtataccaccttatggatgacaggaatcttcggaactttctgtacactgctattcatcttcttcggaaacgaagtcttttcaatattcgtacccgagcaggcagcctatgaggccggaggtgtatttctacgcattgacgggtattcccagcttttcatgatgctcgaaatcaccatgcaaggagtattctatggtatcgggcgtaccgtacctcctgctattatcagtatcggatgtaattatatgcgtatcccgcttgccattctatttgtacgaatgggcatgggagtagaaggtatctggtgggcagtcagcgtcacaactgttgccaaaggacttatcctcctaagctggtttatcatcattaggaagaaatgcctgaacctcccgtccgtagtcggaaagtaacagtttatcgacatttttcagcactctgccaagagtgtgcgagttattttaacttaaaaagtatcaccttggcaaataatatgtatctttgcgttgttatttaaaatataaaaacagattattattaaacaattaaaacatcaacattatgaacaagatgaaatttatggttctctttatgagtataaccatgatattcagtggatgtgcaagtatgaataacactggtaaaggtgctgctattggtggcggttcgggtgctgcattgggtgctatcctaggtggtgttatcggtaaaggtaaaggcgctgctatcggtgctgctatcggtacggcggtaggtgcaggaacaggtgctctcattggtaaaaaaatggataaggccgcagcagaagcaaaacaaattgaaggcgcacaagtagaacagataacagacaacaacggattgcaagccgtgaaagtgacattcgattcaggaatccttttcacaacaggtaatgctaatctgagtgctgctgctaaatctgcattaagcaaattcgccaacaatgtgctcaaccagaacagagatatggatgtatctatctatggatacaccgacaatcagggctggaagaacagtactgccgcacaaagccagcaaaagaacctgaacctgtcacaagaacgtgcacagagtgtatccagttacttattaagttgcggtgtttctaccaaccagattaaaggcgtgcaaggtatgggtgaaagcgatcccgttgccagcaacgatacagccgcaggtcgtgaacagaaccgtcgtgtagaagtgtacatgtacgcaagtgagcaaatgattaaagatgcacaggcagcttctaattaaaaaaattctgcgttatacacgcaatctgttgattctcttttttacatcgaccttactgacggtcattatttatcggttcatgccggtttatattactccgttaatggtcattcgaagtgttcaacagatcatttcaggagataaacccacgtggaagcacacgtgggtttcttttgataagatatctcctagcctgccaatggcagtgatagcttccgaagacaaccgttttgccgaacacaacggattcgatttcgtggaaatcaaaaaagcgatgaaagaaaatgaaacaaggaaacggaaacgtggagcaagcactatcagccagcagacagcaaaaaatgtattcctatggccacaatcttcatgggtgcggaaaggcctggaagtctatttcacttttctcatagaactgttctggccgaaagaacggattatggaagtttatctcaactcaatcgaaatgggtaaagggatttatggcgcacaggctgctgcaaaatataagttcaacactacagctgccaagctgtccaaaggtcaatgtgcactaatcgccgccactctcccgaatccgatacggtttaactcggcgaaaccttcggcgtatatattaaaacggcagaagcaaatattacggcttatgaatctcgtccccaagtttccaccggagggaaaagccgcaaagaaagagataaagaagaagaaaaaataaaggagcaaccgaagtctacttcgttgctccttgcattatcaataagcttgtttgaatgtattatccccatttatacaaaatccttcaattcctgttgtaaacgttgtcgtgtaaaaaatatgcggctcttcacagttcccaaaggaaggcccaatttgtctgcaatctcacggtatttaaatccggatacatgcatagaaaaaggcaccttatactccttaggcaatgcgttgacaatacgatgcatttctttcaagtcataggcaccttccgtactcatgaatcccgagtcctgcggtaaattcaagtgataataattatcagtctgatcgacgaaagtctggtcacgtactatttttcggtagttattaataaagatgttacgcatgattgtgtacatccatcctttgaaatttgtgtccggaacatatttttcctcattatctaatgcttttaatgatgtttcttgcaataaatcattcgcctcttcacgatcggcagtcaacttatacgcaaaacgaagcaattcctcctgaactccaattaaatcttttctgaaacttaaacttttcatactttaagggttttatggttaatatttcgtttttctcgatgatgcaagtttaaaggtattttgaataccagacagggggaaattcgtcatttcttaggggttaattctatcaaatgacagttttcgggtgcatttggatagatttcaggtggtaattaatgatttttattctgttctgtttggcagaaaaaaacaaatagcctacttttgattaatatatttaaataaaatgaaaggctatgactatacttattattgtaggtattattgtactattgggaattattttcgcatccatgtacaactccctggtgaaactcagaaacaatcgtgaaaacgcatttgccgacattgacgtgcaactgaaacaacgtcacgaccttatccctcaactagtagacactgtaaaaggatatgccgcacacgagaaagaaactctcgaccgggtgattcaggcacgcaacggtgcggtcagtgccagaactatcgacgaaaagatagccgccgaaaaccagctatcctcggccctgtcaggactgaaaatcacattggaagcctatcccgacctgaaagcaaaccagaatttcctgcaattacaggaagaaattgccgatgtagagaataagttagctgctgtccgccgttatttcaactcggcaaccaaagaatataataatgccgttcagacattcccttcaaacattattgcgggaatgaccggattccaaagagaaattatgttcgatttgggaaagaacgaacgtgttaatctggaacaggcacccaaaattagtttctaatccgaacaccaccgtcccacccaactgcaaaaaataaacacgcgatgcaatacgtcggaatccaaacacaacagaaccggaacaacttacgttccggattcctattactactttttccttgtttggtaacagcactcctttatctgtcctgttacttactcgttctcttcggatacggaaagagtatggagattgaaatgatgcctatggtcaatcatttctttctctcttctctaccgtatactttaggagtggtggtaatttggtttctcattgcctattgggccaatacaagtatcattaattctgccacatgttccaaaccactagaccgcaaagagaacaaacgcgtttataatttagtagaaaacctctgtatgtctcaaggcatgagcatgccgaaaataaatatcatttatgatgattcactgaatgcatttgcaagcggtatcaatgaccgcacatacactattactctttcaagaggcatcatccagaagctgaatgacgaggaactggaagcagtaatcgggcatgagcttactcatatccgcaatcgggatgtacgtttgctgataatctctatcgtgtttgtcggcatcttctccatgctgacggaaatcaccttctatgcgattacacatatacgtgtacgtagcaatagtaaaggtagcggaggaattttcatcttcatatttatcgctttactgatagctgctatcggtttcctttttgccagcctgatgcgttttgccatttcacgcaaacgcgaatatatggcagatgcagggtcggcggaaatgacgaagaatccgctggcactcgccagtgccttgcgtaaaatatccgccgatccggcaatagaagcagtgcaacggaaagacatagcacaattatttattcaaaatcctaaaaagaaaaccaaaggcttatatagcaaattcagcggtttgtttgctacgcaccctcccattgaaaagcggattgagatattggaacagttctaagttcttctgaaatataaggtaaaggtcaggatttctgtttaattttcattaaagaaaagagaggggttcctgactttttagtatatttgattgttatacatatatatatcaacctaaatgcaactgacatgaaaatgaaaaaacaaatccttatgctgttgctagctttgctagttggtcttcctactctttcggctcaaagcaagaaagagaaaaaggaacagaagaaagaagctgtgaaagaactgattgtttcagagaattataagatagacgtcaataccgccatgcctatgcgcggccggtctattccattgaccagtttatactcactggaaatcagaaacgattcggtaatctcctatttaccttattatggtcgggcttacagtatcccttacggaggaggcaatggactcaatttcaaagcccctcttaaagagtataacatgaaactggacaagaaaggcaattcagtaatcacattcaccgcccgcaacccggaagataagtttgatttcagagtgaaagtatattcaaatggttcgacaagtattgacgtcaatatgcaaaaccgtcaatccataagcttccagggggaactggacgtgaaggaagaataaaccaacttccttccgtcattgctctttgttctcgtttgcctccacttcgtcactaccttttaatataggcaggcagatgtgatatttcacggcgagaatacgggcaagaaaaactgtcgaaccgccaaccaattgacatccgtacgactccatgcctgcgacatgacaaagccagtaagtgatgccgcctactacgcacgccattgcataaatttcttttctgaagattagcgggatttcgttgataaagacatcacgaatcacaccgcctgccgctcccgtaatgctacccatgatgatagccacccagaaaggatagcccaaagcaatgctcttgcctacaccaacaacagtaaacagtgccagaccgatcgagtcgaaaataaagaaagtattattgaggcggatcagccagcgtccgaaacaaatcacccaaagcaatgctacgcctgtacaaattaaataaatagggtctgtcatccacccgggagtaacatcgagtagaacatcacggattgtaccaccaccaatagccgtagcaagacctacgacgtaagctccgaaccagtcgaatcgctttgccgaagctagccggataccactaatagcaaaggcaaatgtgcctataaaatcaagaatttgaacgaatgtgggcatatatttgttattttgtttgcaaagtaacaaataaattccgtaagaaaatgtacttttgcttcaagaattaaactgaatttgatagaaacagtcattagtgtcccgttaaaatgggacgagttaaacaattaatcaaaaagccccggaatcaggggatcatttagatctttgacatcattgaaattagtcttgtcgaacaggtcacgcaagtgggttttgtcagtcaatgatatgctgagaatttgcaaaacttcataggttgaacgtttcaacttcatatcatgttggacaatagccacaagacagtacgtgataatagccacactgatttgtatgcgaacagcgttctctgttgtgccccagaatttctttatcttgagatgctgcttgagccatttgaagaacagctcgattaaccatcttttcttataaagattggcgacatccagtgcagaaagttgttttgcattcgtcaagaaagtgaactcacggtcatcctcttcgtcgtaatatcggacgagtctgaatgactcaggatattttttctcggagagatatccggtcagtttcacttccgcatctgtcattatgttctttggcattcttcgcttccatttgactgtcttatactttaagtttgtcttggctctgacaacaaagaaagagtctgtaagatgtatcctatagagttctttaaaggagtcataagccctgtcgaatatataataagcatttggttcataatggattgaagacattgctgtggaatcatgctttgaagcagtggttacggtatagaaagcaggaacttgtgcttcaatgtcgtataagacatgagctttcacccctcctttcttgcttcggaactttgcccatgggaatgttgcaagacacaacggaatcgttgttgaatcaaacgcatatttctttccggaaatgtcaaggatgttggtcgtccgcttctcgcaggcttccttcatcatatagaatgcaaagtcttcgaagattctgtaatcacggttctggttggctgtcgcaagagttgttttggctatcggttcacgacctaaaccaagatgatattgcttggccctatgcgcctcgaaagcaacgattaagtctcgcaggctttcacggttactcagttgtccaaacatcatcgcgagcatctgattccagcaagtgaaatgtttcacatatctgttgccatcatacttgcgaacatagttgttgaactgagtcctgttcagaaaagcggttaattgagagaatacgtatttgtcttggaacatagcagccatttgtattagactgcaaagttgcaaaatcaagtccgtttcattttaaaaaaccgcgtaattgactatatttcaataatttcaaagaactaattatccacttttacgggacagtagtgagaaacagtatgaaaataacaattgttgccggggcacgccccaatttcatgaagatagcacccattacacgggctattgaagccgcacgggcgctgggtaaaagtatctcttaccgcctggtatatacaggtagaaaagatgataccagtttggatgcttcactgttttcagacctcgacatgaaggctcccgatgtgtatttgggagtagaaagcagtaatccaacaagtttgacagccggaatcatggtagccttcgagcaggaattgactgaaaacccggcacacgttgttctcgtggtagacgacctcactgccaccatgagctgcgctatcgttgccaagaaacaaggaatcaaagttgcccacctcgtagccggtacccgttctttcgatatgaaaatgccgaaagaagtgaaccgcatgattacggacggattgtccgactatctgttcacagccggaatggttgccaaccgtaacctgaaccaaacaggaacagaaagcgaaaatgtatattatgtcggtaatatcttgattgatacgattcgctataaccggaaccggttactcaaaccgatttggttttccgtattgggactgaaagaaggtaactatctcctgctcactctcaaccgccgcgtactcctcaacgacaaagagaacctgcgccagcttttgaatacaatcattgaaaaatcagcaggaacgcctatcgttgcacctttacatacttatgtacgcaacgcaatcaaagagttaggcatcgaagccccgaatcttcatatcatgccaccgcagaactacctcttcttcggatatctcatcaacaaagcaaaaggaatcatcacagattccggcaacgtggccgaagaagctactttcctgggcattccctgcatcacgctgaatacgtatgccgaacacccggaaacttggcgaatggggactaacgaattagtcggtgaagaccctgccgaacttgccaaggcaatggatacactgatgaaaggtgaatggaaacgaggtgagcttcccgaacgctgggacggacgtacagccgaacgcattgtacaaatccttaccggcaaataatatcgccctatataccttttatcatttcccggcataccaattttagtttcgtgccgggaaactaaaagtttccttatgagaaaccatagtttcatcaatgggaaactttagtttcatcacggagaaactttagtttcagacgcttgaaactttgggtttcatatagcgaaaccaaagatttctcatgagggaacaaagtgtttcaagccgggaaaccaaatgtaacaagcaagggaacccaatgtaacaagcgggatactcatttatagaaaggcgaatcacccactaattcctttcattgtcaaacgataacagcttgcaaataacaaaaaactatgggtaaaaaaagttatatattctgttaacatccgagttatttgttaactttgcagccctactacgaacgttatgaaacaacgatatagcaaaatacttatactgttcttactcgtattggcaggttcaaatgcttttgcgcagcaaattaaaggggtggttacagattccgtaacccatgagccattgatgtatatctctgtctactatcaggaaaaaagagacatgggaactatcaccaatatcgacggagaatataagcttgaaacccgcagaaacggggggacactcgtgttctccgcagtggggtatatcagtaaaacggtgaaagtcggttcaggcaaccagacaatcaacatacaactggccccggacaatgtcgtattgaacgaagtagtagtaaagcccaaaaaggaaaagtactcccgcaagaataacccggcagtcgaatttatgaagaaagtcatcgaacacaaaaaggcacaagtcctcgaagtgaacgattactaccagtacgacaagtacgagaagatgaaaatgtcgatcaacgatctcacaccggaaaaactggaaaaagggatttataagaaatattctttcctgaaagatcaggtggaagtttcggaaactaccaacaaactgattcttcctatctccgtgcaagaaacagcttcgcaaactatcttccgcaaagaccctcagaacaaaaagaccattattaaaggaaaaaactctaacggtatcgaagagttcttcaacaccggagatatgctcggcaccgtattaaaggatgtttttgccgatattaacatctacgaggacgatatccgtttgttgcaacaacgttttgtcagccctatcggcagcagtgccatttcattttataaatactacctaatggatacattaatggttgacaaacgcgaatgtgtacatcttactttcgttccgcaaaactcacaggatttcggttttaccggacatctatacgtgctgaacgattctacatatgccgttcagaaatgtaccatgaacctgccaaaaaagaccggagtcaacttcgtcaaccgcatggatatcgtgcaacaatacgaacaactccccaacggaaactgggtattgtcggatgacaacatgaccgtagacctttcatggagttccaacaaaacggcaggaggactacaagtagaacgtaccacgaaatatacgaattatcagttcgacccgatagagccgcgactcttccgattgaaaggagaggtgataaaagaggcggatatgctttcgaaaagtgacgaatactgggcaagcgtgcgccaggtgccgctgactaaaaaagaaagcactatggaccttttcgttaatcgtctcgaacagattccgggattcaaatacatcatcttcggtgcaaaagccctgattgagaactttgtggaaacatccggcaaaggccgtccgaacaagttcgacatcggccctatcaacaccatgatttcgagcaactacatcgacggaacccgtttccggttgagtggtatgacgaccgcaaacctcaatccgcactggttccttagcggttacggagcatacggtctgaaagacaagcgctggaaatatagcggaacgctgacttattcgttcaacaaacgtgattatgtggtatgggaatttcccaaacattacatctccgccacttatagttatgatgtaatgtctccaatggacaagtttctgtttactgacaaggataatatcttcctgtcactgaaaacgaccaccgtagaccagatgtcatacatgcgcgacgcaactatcaattatgaactggaaacgcctaccggattcggtgtaaaagccatgctccgtcaccgtaacgacgagccgaccgggaaactggaatatctgcggaatgacgctgcgcagacacgcgtacacgacgtcacaacctccgaagccagcatgacattgcgttatgcaccgggagagtcgttcgtcaactcaaaacaacgccgtgtccccgtatctttagacgctccggtctttacgctgactcatgccatgggattcaaaggagtgctgggaggagaatataatttcaaccgtacggaagcaagtatctggaaacgtttctggcttcccgcctcatggggcaagattgattgcagcgtgaaggcaggcgcagagtggaataccgttcctttcccactgttgattttgccggaagccaacttgtcatatatcacccagcgcgaaacgttctgtttgattaacaatatggaattcctgaatgaccgcttcgcttccatgtccatatcctacgatatgaatggaaagttgttcaaccgcattcctttacttaaaaacttgaaatggagagaaatgttccgtgtccgcgcattgtggggtacgttgacagacaagaacaatccgtttaaaagcagcaatcccgacttgttccgtttcccgacgcgcgacggtaaattcaccagtttcgtaatggacccgaaagtaccttacgtagaagcaagcgtcggcatttacaacattttcaagttgctgcacgttgaatatgtacatcgtttcacttaccgtgataatccgggtatcaacaaaaacggtattcgtttcatggtattaatggtattctaaacttatgcaacctttagcagaacggttacggccaaaaactctggatgaatatatcggtcagaaacacttagtgggaccaggcgctatcctgcggaagatgattgacgcaggacgcatttcttcgtttattctctggggacctcccggagtgggaaaaacgacactggcacagattatcgccaacaaactggaaactccgttttatactttaagtgcagtgacttccggcgtgaaagatgtccgcgaagtgatagaccgtgccaagagcaaccgatttttctcccaatccagcccgattctgtttatcgatgaaattcatcggtttagcaagtcgcagcaggactctttgttgggagcagtggaaaacggtacggtgacactcatcggtgccaccacggagaacccgtcgttcgaagtgattcgtcctctcttgtcccgctgccagctttatgtgctgaaatctctggagaaagaagatctgctggaacttctggaacgtgccattagtacagacacggtgctgaaagaacgtaagattgaactgaaagaaaccacagctatgttgcgcttctccggtggagacgcacgcaagttgcttaatatactggaactcgttgtagagtcggacactgacgatactgttgtcatcactgacgatatggtgacagaacgactgcaacagaatccgcttgcttatgacaaagacggggaaatgcattatgacatcatctccgctttcatcaagtctatccgcggcagcgatcccgacggtgctatctactggctcgcccgtatggttgaaggaggtgaagatcctgctttcattgcccgcagacttgttatttctgctgccgaagacatcggtttggctaatccgaatgcattacttcttgccaacgcctgttttgagacattgatgaaaatcggttggcccgaaggaagaattcctctggccgaaacgaccatttatctggccaccagtcccaaaagtaattctgcttatagcgctattaatgacgcattggaattagtccgttctacgggtaatctgcctgtccccctgcacttgcgcaatgcaccgacaaagctgatgaagcaattagggtacggacaggaatataaatatgcccacagctacgaaggcaatttcgtcaaacagcaattcctgccggatgaactgaaagacaaacggatatggcaaccgcagaacaatcctgccgaacagaaacatgccgaacggatgatacagctctggggagacaaattcaagaagtaggctaatggcagaaacaaaataaaacaacaagaaacgtataacatattattaatactaaaatagaaaatgaaaattgttattttagacggctttgccgccaatcccggagatatatcctgggaaggtttaaaggctctcggagaatgtacgatttacgaccgtaccgcccccgaagaagtattagaacgttcagccggtgcagaagtaattctgactaacaaggtaatcatcaatgcagaccacatggctgccttgcccgaactgaaatatatcggtgtattggctaccggatacaacgttgtcgatacggctgctgccaaagaacgcggtatcattgttaccaatattcccgcatacagcaccgcttccgtagctcaaatggtatttgcacatatcctgaatatctcccaacaagtacagcgccattcggaagaagtccacaaaggtcgttggacaaacagcaaggatttctgtttttgggatactcctttaatggaactgagagacaagaaaatcggtttggtcggactgggaaatacaggttacacaactgctcgtgttgctatcggtttcggtatgcaggtttatgcactgacttccaagtcacacttccagttgccgccggaaatcaagaaaatggacttagaccaactgttcagcgaatgtgatattgtcagccttcactgtccgcttaccccggaaactcacgaactggtgaacgcccgccgtctcgctatgatgaagccgaacgctattcttatcaatacaggccgtggtccgctcatcaacgaacaagacttggcagacgcactgaacagcgggaagatttatgctgccggagtagacgtgctttctaccgaacctcctcgtgccgacaatccgttactgactgcaaagaactgctacatcaccccgcatatcgcatgggctacaaccgaagctcgcgaacgtctgatgaatatggcgatcagtaacctccaagcatacattgccggaacaccggaaaacgttgtgaataaataaaacgacggagaacgataaaaatgaacggtgaacaagttgcgcatctatcgcaggcttgttcaccgtttatcgttttaatcaaaattatcgttcctgattcattatcaacgtccgacccgtatcgtttagtaagaatgccctccctcatccatttctttctctgtaatcttatgacggtcgatgctgcgccatgcatagaatatataggcaagaacgaacggaacaagaatagaaacatacgccattgttttaagcgtaaattcgctggaacagctattggccagagtcaatgaactttgcaaatccgtataagacggataataagcagtattgttgtatccggctaccaataacagggataaaaccgtcagcacagtgccaatgcccgtaaaccagattcccttatcaaaagtctttttaagaaccgtctttccgattccaaagagaaccaataccactccgataaggaaaaggattaatacaaccggcatttcgataaagttagtaaagtacttgaatggctgcatataaacctcctgcgtatcaggatttacggcaaaaccgtcggataccaatgtacggatgacgaaagccagaaagaataataagaataaaaccgtattattcagtacggcacgacggcatttatcggtcaattctttatcatctatattattaatgaaataaagtgcgcccaacacacgagcgaggaaaaatacagccagccccagaatcacattccagatattggtcaatgcatcaagtccatgacacccattgccccaatgactgataaccggcataatggtatccgtcatattcgccttattgatataaaaatcagaaccggtgaaaaaggtagcaactgccccgccaagcaacaaaggccccactaccccgttaatcaccaaaaacgtccggtatgtctttttacctaacagattgcctgccttactctgaaattcatagctgacagcctgcaacacaaaactgaaaagaataatcatccaaagccaataagctccgccgaaactggtactataaaataaaggaaatgaagcaaagaaagcacctccgaacgttaccaatgtagtaaacgtaaattcccatttgcgaccggtagaatttaccaacatcttgcgatgttcttccgtcttgcccagacagaacaataacgaattacctccttgcacaaacaataagaacacaagtatggctcccagcaaggaaacgatcagccaccaatattgttgtagaaatatatacatatattttaagtattaagttttaagtattatgtatgacgctctgatatcagattccaggtattaaacctccggccccttcttgatagcccttatcatgattcctatttccgcaatcagcattacggtaaataaaaacaggaagataaagaaagtagtctgaacagaaccgacatccaacttggagatagccgccgatgtaggaagcagatcccggatagcccacggttgacggccacattcggcaaccacccaaccggcttgtccggcaatgtaagccagaggaatcgtcagtaaagccacccaatgcatccagcgcattttgcttaaatcctttttatagataaagaacagtacaacaataaagaacagaatgaaatatccacccagaatcaccatgacacggaaggcataaaagttcagaggaacattcggaaccaactgattcacatccttaatatatccgtatccgaaataaggaatattctcctgcaacactttgtatgccacttgcgcatcctcctcgttcccggcactcttcgcagcacggtaagcagccagcgcaccgatagccgttttaccccgttcaatcttttcggcagccgaaagagcaatcgtaccgtctttctgttgatagccaccttcgataatattcgtaattcccggaacataagcattggcgtcacgctcggcaaggaaagaaagcatactcggtatctcaatacggaacaggaaaggttcttttccgtcattataagtcttcttttcgggattcagcatgccgattcccaccaaacccacattcgtaccaccctcatacaatccttccacagcggcaagtttcatcggctgcgtctgcgcaatctgataaccggagccgtcgcctgtccaaacggaaagcagtgatgccaccaatccgaagatagcaccaatctttatgctggcaagtgcaaactcacgattgcgcttcttcaacaaataccagcaaccaatgcctactacaaacacgccacccagcacccagccggacaacaccgtatgaaagaatttattgacggccacaggcgaagtagccaccgcccaaaagtccaccatttcattacgaaccgtatcaggattgaactccatgcccaccggatgttgcatccaagcattggcaacaagaatccaccaggcggaaattgtagctcccagacctgtcagccaggtagaagccaaatgaaaacgcttgctcactttctcccagccgaagaacatcaccgctataaacgtagcttccatgaagaaggccaaaatcccttcaatagccaacggcgcaccgaagatatcgcctacgaaccacgaataattactccaattcgtaccaaattcaaattccagaatcaaaccggttgccacaccaatggcaaagttaataccgaaaagtttcatccaaaatttggctgtccgtttccagaattcattgcctgttttataatacagcgtctccattattcccattaccaccgccagtccgagcgtaaggggaacaaaaatccagtggtacatagctgtcatcgcaaattgggctctcgaccaatcgatcagcgaggtgtcaatactttcaatcataatcttatgtagtttaaaagttaaaaatcagtagatttctcgggaagagcacgttgtatcagttcatttcccacatacgttcccttgtcggcatccgtagggtggtcgccaagaaagtcggggaagaagaacaacttcagaataaagaacatgatgaataatttcaaaaggataataatccacagagtacgccccaaagtcatacttcgaaagccttccaggtagaagttccagacggaaagtagtgtattcttcatatttctacgtcaagatttgtaatgagtacaaatatacaatttttataattaaaacaaacaaatcccttgaattgttgcagaatttgtcgtgtttttatataaaatacagctataagataggaataatttaggaataagcaacttgcgcactttttgcaacaagtgaggtaatgacttggcaacggtcataaattctgcgatgtgcagtacattgctgtcaaacaactctatgcaaaggtaacttatattttcgacaaacgaaatgcaatcagtattttattgccgtttcccttccaattttcctaatcgcattactatcgaggtttgacttctgcccattttctcggctatgtattttatacttttcccttcatgataaagggtaagcagaaaattatccgcactgcgtgtccactttttgttggcgtttggatgcttggcataactttcttccgtgattttttccggatgcaagaattcgtctacgaaaacggaaggaaagcgtctgtcatacagtatataggtctttactttagctctggtaatggctacataaaacagcctgcgttcttctccgtatggatattggtcgctttttgtcaagacataattaagcactgggtcatcgcttacaagtgagggaaacccgtatgtatccttgttgcattgaagaattatcacatagtctgcttcaagtcctttggatttatgaacggtcagaaactctattttcctgtctccgatgatatagaaaaagcgattaccctctttcacggatttatacatgaacgacaggtaataatcgtcaaaggaatatctccctaacaaaaagactgatttgtctaatggaattgacgcgaccaattgtccgataacattgcaataatctcgtctttcataatcgcaaaactgtaattctgttttaacttgtgggttaaaaggatggatgttctttttaatttgggcttcgttgcgttggataaattgcgaggacaggctgactaaaggctctccaaaccgatatgttgtttcaatcttattgatttctgtctggccgaagtaatctgaaaactgattgaaaagtgccatgtcgctccccgaaaaacgatagatggactgccagtcatcgcccacacaatacaacttggcgggtggatttccctctcgcaatacttttaagaagttgtaacggtcaactgatatgtcttgaaactcatccacaatgatataatcatacttcacaggatgggaggaacgacaaatgtcggtagcttgcagaattgcatccgtaaaatctatttggttgatgttcgccaattcttcaatataccgtttataaacgggctgaaagatgtttttgataatgaacgtactgcgttcgtcccctgcgtttttagtttgccttaatacttcatctacagatttgcaacttgactttatcaatgtcacaaaagtcacgacaaggcggataaaagccttctcatgcttgctgttcgggggaagaaccatatcgtataattctgcatctgttttctcttggatggaaacatcagccttttccaataaggttttcaacttctcccgaatatcggaataatgaaagtctgcacttgaagttgtcaacagcttagtgccgaatttctcatgtgccgcttttttccatgttatgccatcgttgtacttttggtttgcttcttcataggtaatgcctctgtctttggcaaaccatataggaacaagcccatgctcgtccactccaaaatgctctaaatatattcgctttgtttctccaccttgttcaaaataaatggaaaaatccggtttgtattgagagtgcatctcgtctaccaatggatgctcgtatggctcttcatatctgaattttacgctaagggaagatagcgcaaagcatattttctgctcttgttcactccgtacataaacagtttttccatccatatcgggaaacgttgctttcaaacgcacctctttttgctctgaaagttgttgcctacgctcattcttccgcttttcccactccttttcgggcgtttgataatcaatgaagtattctattacgcttttcttgaatttcttgtcgttcaataattcatggtagattttcacgaagagcgcgtccgtattttcatatattgatggcttttgtcctgttgtctgtccgataatgtcaagggcaagtttgtgaaaagtgtaccctcgcaaaccagcaatacccattctttctgttaattcagcggcagccttgtttgtgtagctgataaggagaatattttgagggttgattttctttatttcagtcaaatactttactttccctacgatggatgaagtctttccactccctgcactactgactactaaacaattttcttctcctgaaacgattgagcgtctttgttgcttgtctaacggatattttaggcaatggtcgaaaaactctttatgcgtgtcaagtagaaatgtaatgattccctcattatgttgttttacaagtctattgatagccccaaagtcactgataaaattgaatatggtttcagatggagtgatattaaaggcttcaagtttcttaacaagtgaatatgcttcttgaaaatgcggcttataatgattgacaaaatctttttcttgcgttgcagatattatcttccctgaaaaagtgctattaaggtcggacggaatatcaataaatgctccgttgtttaatgccgacaatctttctcttgcttgctcataattggatttattgctataagaagatatgtggtttaacttttcagaaagttccttggacttattttttaggcgtgttcttgttatagctatataacaaattgaaatagttataatacaaattaccccaataaacaatgcctgcatactaaaagaaagatttgccgttgataaagtttacattgtataaaaggttaacgtgccatgaaggcacgctaactttctattctattaaaagacgggagttacagtaaaaagctatcctccctaaaataatctattatatcttcatcagaagttgcttcatctacagctttcaagatttttgcaaagttctcaaacttatcaacttcataaccgccacaagttgtaaactctttatcgcaaaagaaaatcatttctcccggaatggtcattgagcctgcgccattaagactcctaaatctatgacttaccgcccaacctgtaaattcacctttgtgatattttgcaacattttcttttagagaaacaagttgttctgaaagtttcttggtatatttatccaaatcagatttggcttcttctttctctttttttgcccgcgcatattctccacgagagtattgagaagaatatccattaggagcaaaaatatccatagaagattctgcggattcgactttcattttacatctgtttattttagacatcaaatctttgatgtcctcactaattttcataataggttcaatagtagttacatcaatgaacatactatcaacttttgttgatattggttcataagaatctgggtgatagagatagtctttaagcgtctctttaaccaacttctcagctttttcctcgttagagagtgtgcaagaagtcataactaatgcaactgcacaggatagtaaggtaataacattcttcataatgttcactattttaatgataattattgacacttatccaaaacacgaagcgtggcactgcgatgctacgtcttagttcggaggtcctgagaaaaccctgtgtacagatgtagtaatagcagcccacgctatagcgtgagaaccactatgctacccttgtacacaattcagaaatttctcaggtttccgttctacaagataagcataacgcttcttctttttctatgtctcggaaagggcttccccaatccaattgcaaaagtagctaaaatccttgataaattcctttcattgaatgattttctttactttttgagactgtttgagcgggatttatgcgcgtgcattaaattttcatcccattactttgcttttgggtagtaatccccaaaccgtttctccattcatgcgccttctgccggaaccattgcacaagcggaatatcattcacgcatattcggaaatgtccagttctgcttttatcttcttcaaacgagaaagccgcaccttctgcatggaatttacggttaaattcgggtgaataaaaatcacctttcaacttcactttcttcaacttgcacaattcttggataatctgttcggagaagtgcagcgtattacggcagaagtctatcaagggcaacaatttatccacatgagggaagtatcgttttaccttgtctatatactcactgaacttgatgcattgggcttggtgttcacgttccatctgcttgatatattgctctaatcttgcatttttattttcaagttctgcgatgcgttgttgaaacccttccctttccgctttcaactttccaccacccaaaagagaaccgacctttgccacgagtgcggctttcgcctcggtcttagcggcttccagtttttccgacttgattccttgcttcacctcgtcaagtttctgttccgcctgttgtctttccgtttgcaactgctgcacattggcttcaagttctcccgtctgccgcttcaaatcacggtaatattgggcggtggtggtatgccgtgcctccgagccacggatgccacgctgcaagccgtatttcgccattgcttcggcgtagctgtcgtgataggctgacagcttctcacgtgtcagcacgtcatcggcgcacaggcgaatggcatccgttttcttgcggtaggtgcgcttgccctctgcctgttgcttctttttcgctttcctgcgctcgcccgttacaatcggtacgaccgtggcgtggatgtgcggcgtatgctcgtccatgtgcaggactgccgaaacggtgttctcccgtccgaaagtgcggtgcagccattgcaggttgtcgacacaccattcgttcagtctgccctcgtccttcactttcatcatgtcctcatgcgtgcctgaaagcacgatgcggattgccctcacttggtcgggcgttatcttcctcttgatgcctgccgtgcggatgcggtggttgattgctccggtgcggtctgtcacgccatcggggaagtccaccagctcacggttgaggcaggtgcgtgtagggtcggcgttcttggggacggttttgcgttcgatgtggtcggacgcgcccgtgtccgccgagcctttcgccttgttgaattggatgcttatgtatcccatttttgtcttttatttttataggttctacaaacttgtttgttcattcccgtccgttgcggtcgtgccgcatgaaaacgggggtgtccagagggggtaaccccttcggctcattggggcgtttttagcattagcgcagcggtgcgtgaagaaaacgccctaatgagctatggcttttccgttcctcaaaatccgctgcgctgtcggtggtcgccggatgtctttcctctttcgccagcttgggatggcatgtcatgccgccatgtcggtatgtcaccatagtttcgtgccgtcatgttgccatgcctgcttgtcggcatgatggcatgtcggcatacgtaatacctgctgggggcatccagccgttttccccacggacttgttgacgggtgtaaaagcgttgaagtgttgaatatgacacataatacattggtatattgtttgatacgcgctcaacttgtcctcaacaaacgcatgatgcccaacaaacggcaacgaaaagaagaagtgagggcagaaccgaatgttgccttgttccttcttcatcgtccgttgggcgttgttggtattctgttgagtctgtatattgctatatatcaacattctattatatatattcaacaattcaacagaatatcacaggctttcctgcagtcccttggttacggtgtaatacctgcctactcccttgcgtggctgatagcgtccctcgccgccatacacgtaggtggtataggtaagcccgttgggtgcaggggacagcttccagcattcctgcaccactttccgcacctgcagcttctccgccttgacctgcgaacacagcaacagggggatgatgtcatgcaggcagaatgacaccgtttccatctccatcttcgccatgatgtcgagtagcaagtccgccatttctatttcgaggcggttgcaattactgcagataatcttccgcaaggcttccgtttctatttgcttcggtgaaaaccacatacggctttcttttttcgttgccagcgtcctgtgctgcaaatgatacaggaaagccgggatttcatctttcagcttttgcaggaagtcggtgtcgtcacactgcaaccgctctatcttgcgtacccaatagcgtgtctcgcctgcgtcgatgatgacgggcagatgctcgttgttggaacacaacacgaacttggcgaagaaaccgatttcgttacggtctttgcccttggcttccaccttgtaggaaagtgtagtgctgaggttcttcagacgttcgctgtcctccctgcggttgagcagtacttcgtccaccataatgagcagcttccctgcccaatcggaattgaactggctgcggaagtcctcgttggtgttgaacgtcacgttgtcttggaaaatggctttcaggaagttgaggaacgtgcttttgcccgtgttccgttcttcggacacgagcaacaggataggaagtttctgaataggataaaggtagagcaactgcatgtagtccatgcccaactcgtattgttctccgaagatatgctccactaacgagcggatgcaggggaaactgccctcctgcggtcggtgtcctatcggctcatagagattgaggaactttccgacaacgggcttgtagcccacatggtcggggacggtacagaaaccgtcatacttcggcacggtagccatgcggtctttgccgtagtcctgccgcaaggtctcggagttccatgcgatgcgtttcttcacacagcccccgtcaatcagcggctggtcaacaatcttgtagagggtagttcccacacggatgaattcgtcttgttctaccataggttttgcttggttttatgtcgccgacagcagtgtcggcaacgggttaaacaatcgggcgcaaagttatggtgtgacacataaaacactgatacgtaaaatgaagcaaaacggtgcaatcgtaacaagcaggcaaaaaaatgcagaaaatcgcataagggaaaggggctggaaagaaaaaagaaagcccgaagaagcatggcatcgtcacttcttcgggcggttagcgtaggtacgtacccacgctctaacactcgagcatcggtctgttcattgacacccacaggacttgtctttctttttgcccgtacaacctttccaacagggctttgcgtacccttctcgcgcatggggtgttgatgcggaatgcgagtgccacgaccatagacagggcatacacgtccatgccgtagccatcgggcaaacggatataccgttctgccttatgttgtttcagcactccactcttatatatggcgcgaatagctgtacggagtgtcggggcgattgtaccaaacaatgcggacagttctgcctccgtcatccatacatttgtagaagtgggtatcgtcactctaccgtactcgttcatcgtaataatgtcccgttccataatcaagcggttatatggcgaaacgtccgcttattttgttctcaaaggcggaaatgtcgctgtttagtttcgtgttcgttaccttggcataaatctgcgtggtcttgatgtccgtatgtccgagtatcttgctcacgctttctatcggcataccgtagttcaatgccatgacagcaaagctgtggcggctgaggtgaaaggaaaccggcttctcaatgccgcacttccttgctatgctctttatgcgtttgttcaccatgtcaagtgagcctatgttgaacagtctcttgtcttttcggaacggttcataacgcttgattatctgcatcggaatatccatcagcttgacttggaacgggacacctgtcttttgccgtttcgacacaatccacagcgcaccgtttatttccacgacattgtcagtcgtgaggttcttgatgtctatgaacgatatgcccgtccagcatccgaacaggaacaagtcccttgccagtgcgaagttaggattctccagtttgattgcgcccaatgcctgaagttcctcttccgtcaggaagccgcgctccttgtggtcggggtcaacgtggtacattgcaaacgggtttctcggtatctttccattgtagtgagccgtggtgacgatatgtttcaatggtatggagtatatccacacggaagattgtgcaagccctgcctcgttgcgcaggtacaggcaatagtcgcggatgaaatcctccgtaagttcgttcattgttatgtcggcacgtttatattgctttctgataaactcggctacatacttgcgaacagtcaggtatttcagatatgtgcgcttggagcggtctttacccacacgtttggcaaaagccgcgttctctttgtcaaaggcacgtagcaaggtctcatattctgtgcctatgccctgataagcattacgtaccatttcagcggtcacacaggcttcacggtctgaaagacgttggtagtgctttgctatctgtgccttgatgttctccaacgcgaagtttaccgcctgtgcctccttgctcttgcctttggcgcggtttccctttgcatcccaaagtgctttcgggatggtctgcttgcaactgaactgtgcgatagtcccgttgatggtcacacgtcccatgatagggacaattccgttcttctccttgcttgcgttcacgtagaacacggtcttgaatgtacttctcataatccttactttttgtttggtgcaaaattagtttatgggagttgtaagggcagaatgtaaacctacgcagaacgcagaaatatagaccgttagtgttaaaagtgcatccgatgtcgggtaatgatttggaagtgcatctgtttccatattcttcccaaagcctgtcttccccatctatgccactttgtgccaatctatgccgaaacctcctgactgtcagttgaaatgctcaattctgctcaaatcttcattttatcctattctttttctaaaaaaacctgcctatcgacagaaaaaaatcatttaacggcgaaattccgcaatccgtctatcacttttgctgctattataatatgtacgtaccttcgtttccggttaattaatagaagaatgaatatgataaacgtaagaagattgacagtgatagcatttttgggtgcaggtatgctgcccggcatatctgcccaaaattcttctctgcaagtcgatacactgaacgaaacaaagcttcccgctcaatgggacttgcaatcgtgtatcgactatgcccttgagcagaatattacgattcgtaaaaatcgggttactgcggcaagcacgcagattgatgtgaagacagccaaggctgccttgttccccagcctctccttctctaccagccagcaggttgtgaaccggccgtatcaggaatcaagtagcagagtcagtggcagtgagattatcagtaccaacagtaaaaccagttacaatggaaactacggactaaatgcctcgtggactctttataatggtagcaaacggctgaagacaatccaacaggagaaactgaacaatcaggtagccgaactggatgtagcgacttcggagaacagtattcaggagtctattgcacaaatatatattcagatactttatgcagcagagtctgtcagagtaaatgaaaatacgctgcaagtctccattgcacagcgcgaccgcggtcaggaacttctgaatgccggaagcattgccaaaagcgatttcgcacaattggaagcgcaggtcagtaccgaccgttaccaacttgtcacagcgcaagccactctgcaagattacaaattacaactgaaacaactactcgaactcgacggggagaatgaaatgaacatctatctccccgctctgtccgacgagaatgtactgtctccgttgcccgccaaaagagatgtgtatgtgagtgcccttgcccttcgtcccgaaatcgaagcgagcaaactcaatgtgaacgcttccgaattgggaatcgacattgctaagtccggctaccttcctaccgtcagcctcagcgcgggaatcggaacgaatcataccagtggtagtgatttcactttcggcgaacaagtaaaaaatggctggaacaattccatcggattgtctgtcagcgtgcctattttcaataatcgacagacaaagagtgccgtacagaaagccaagttacaatatgaaacgagtatgctgtcattgctcgacgaacagaaagccttatacaaaacgattgaaggactttggctcgacgccaacagtgcacagcaacgctatgcagcagccaacgagaaactgaaaagtacgcaaatcagctacaacctgattagcgagcaattcaatctgggaatgaaaaatacagtagaacttctcactgaaaagaacaacttgctacaagcacagcaagaacagcttcaagccaaatatatggcaatactgaatacacagttgttgaagttctatcaaggcgacaaactagctttgtaaggaatcgaatatcagcattataaataagtaaaagcataataaacgaatgaaaacgaaaaagattattctaatcgctgtggcagtcgttgtggttgtgggagcaggaatctggttctttgcaggttcacccgccaaacacaaggttacgtatgccaccactactgtcagcaaaggcgatatttcaaattcggtgactgctaccggaacgatcgaaccggtaacggaagtagaagtcggtacacaggtatccggtatcatcgacaaaatctatgtggactataactcggtagtaaccaaaggacagttgatagccgaaatggaccgcatcaccctgcaaagcgaactagcttcacagaaagcaacctatgacggtgcgaaagccgaatacgaatatcaggaaaagaacttccaacgcagcaaaggtctgcacgagaaatcattaatcagtgatacggactacgaacaggccctctataactaccagaaagccaaaagtaactacgacagcagcaaagcctctctggcaaaagcagagcgtaacctgtcctacgccacgattacctcaccgattgacggtgtagttatcagccgtgatgtggaagccggacagactgttgcttccggattcgaaactccgaccttgttcaccattgctgcggacttgacaaagatgcaggtagtggccgacgtggacgaagctgatataggtggtatcgaagaaggtcaacgtgccagcttcacggtagacgcttatccgaacgacacattcgaaggagtagtgacacagattcgcctgggagatgcgagcagtaccagcagtacaagttccagcaccagcacggtggttacttatgaggtggtaatctccgcccataatccggacctgaaactgaaaccacgtctgactgccaatatcacaatctatattctcgacaagaaagatgtactgtctgttcctaacaaggctttgcgctttacaccggaagaacctctgatcggtaaaaacgatattgtgaaggattgcgaaagcgaacataaagtctggacacgcgaaggcaccacattcactgctcatccggtagaaataggaattacaaacggaatctccacagagatcatcagcggtgtcaccgaaggaacaagagtagtgacagaagctaccataggtggcataccgggcgaaagcatggaagccccgacaggtcaggaaggcggagaaagaagtccgttcatgccgggccctccgggaagcaaaaagaaaaaatgaatccattttaagaaatcagtctaagaggatagagctgatttcctaaaattaaaataatgtgagttcgatataagtctatactgttcacaactctcctccttcgggaaggaggagtacccgtagggggaggtggtaggtgaatatataggtatatgaaatatactgccttacgattaaaagcaaatggccgcacctaccaccccgccctttggtttcccctcctttccggaagggaaaccatgcggatgatagctgttatatcgaactcacattaaaacaggctaaaataaactttgcgcaaatccgagaagtatgcaaaatcgattctgaaaaccagcagacattttgcaaatgagaaataaagaataaaagatgaaaaaagtaattgaacttcaaaatatcaaacgtgactttcaggtaggagaagaaaccgtccatgcgttacgaggcgtttctttcactatcaacgaaggagagtttgttactatcatgggaacttccggttcgggaaaatccacgctgctcaacacattgggctgtctggataccccaaccagcggagagtatctgctcgacggaatctccgtccgcacaatgagcaaacctcaacgggcggtactcagaaaccggaaaatcggttttgtgttccagagctacaacctcctccccaaaacaacggcagtagaaaacgtggagttgccgctgatgtacaactccgccgtcagtgcctccgaacgtcgccgccgtgctatcgagtctctacaagcggtgggactgggcgaccgtctcgaacataagtcgaaccaaatgtccggcggacagatgcaacgtgttgccatcgcccgcgcactggtgaacaatcctgccgttatccttgccgacgaagccaccggaaatctcgacacccgtacctcttttgagatacttgtcctgtttcagaaacttcacgcggaaggacgtacaattatattcgtaacgcataatcccgaaatcgcacaatacagtagccggaatatacggttgcgcgacggtcatataacggaagatacggtcaatacgaagattctgtctgccgccgaagcgctggctgcattgccgaaaaatgaggaagactaattaaagttataagcttttaaacatgaatggaaccaatttatttaaaatagctctccgggcgttggcgaacaacaagctacgcgctttccttaccatgctcggcatcattatcggtgtcgcatccgtcatcacgatgcttgccattggacaaggctcgaagaaaagtatccagcagcagatatccgaaatgggctcgaacatgataatgattcacccgggagccgatatgcgtggaggtgtccggcaagatccctctgcgatgcagaccttgaaactagcagactacgaagccttacgcgatgagacaaatttcctgtctgctattagtcccaacgtatcttcgtccggacagctcatcgccggaaacaataactaccctgcctccgtcaacggagtaggaacagaatatctcgacatccgtcagctcactgtcgaaaatggagagatgtttaccgaagccgatatacaaagctccgccaaagtatgcgttatcggaaagacaatcgtagataaccttttcccggacggtagtgatcccgtgggaaagattatccgtttcagcaaaataccgcttcgcgtggtaggtgtgctcaaatcgaaaggttacaactctatgggacaggatcaggacgccgtcgtgcttgcgccttacaccacagtgatgaaacgcctgctcgccgtcacttacctgcaaggcgtctttgcttctgccctcactgaagatatgacggactatgccacggaggaaatcaccgaaattcttcgccgcaatcataagctaaaagcctcggacgacgatgacttcacgatccgtacccaacaggaattgagtacaatgctgaactctaccaccgacttgatgacaaccctgcttgcctgtatcgccggcatttcattggtagtgggcggtatcggaatcatgaatatcatgtatgtatccgtcacggaacgtacccgtgaaatcggtctgcgtatgtccgtcggagcacgaggcgtcgatattctgagccaatttcttatcgaagcgatcatgatcagtatcaccggaggtatcatcggagtcattatcggctgcggagccagttggatagtgaaaagcgtggcccactggcctatctatattcagccgtggagcgttttcctttctttcgctgtctgtaccgtcaccggagtcttcttcggttggtatcctgcaaaaaaagctgcagatttagatccgattgaggcaatcagatacgaataaaaaactatctttgtctttatgaaacaaacctttacatccgcacgtcgtcccctggagatactgatacacattatcggctgggggattatgttcggtttcccgttctttttcgtcgaacgtgggaacggaaacatcaactggtgggcttacgtacgccatgccgccgtaccactttcttttatgatcgtgttctacgccaattatttcctgttggttccccgctacctttttcagaatcaggctaagagatatgttgtttacaacatcatcctattatgtgccattggagttttacttcatctctggcagagcctgacattcgacccgtcatttgctccgaaacccaaacgggcgggtatgcctccgggctggctgtttttccttagagatatgctgagccttgtctttactatcgggctaagtgccgctatccgcatgagtgcccgttggacacagaacgaagctgcccgtaaggaagcagaaaaaagccgtgcggaagctgaactgaaaaatctgcgcaatcagctgaatccgcacttcctgctgaacaccctgaacaatatttatgcactgattgcgttcgactcggacaaggcacaacaggcggtacaggaattgagtaaattactccgttatgttctgtacgacaatcagcagacgtatgtccctctctgcaaggaagtggacttcatccgcaattacattgaactgatgcgtatccgattatcgtcgaacgtaaaaatgactactcaattcgatatccagccggacagccagacacttattgccccacttatcttcatttccttgattgagaacgctttcaaacatggcatctcccccaccgaaacgagtttcatcagcattcgtatctcggaaagcaacaaagaggtaatttgtgagatccgtaacagtaatcatcctaagacaatggaggacaagagtggttcaggcgtgggattggaacaagtcagccgacggctggagatactttatccaggggattacacctggtcgaaaggcatttcgaaggagggagaagtgtacgaatctcgactgagtatcaggatttgagaataaaacgttaagtattaaacaatagatatagagaattatgatgttacgttgtgcaatcgttgatgatgagcctctggctctcggtctgttggagagttacgtgaacaagactccgtttctgcaactagccgggaaatattccagtgcggttcaggccatgaaagagttgccggatgaggaagtcgatcttcttttcctggatattcaaatgccggagcttaacggactggagttttctaaaatggtggattctcgtacccgtattgtgtttaccaccgccttcggtcagtatgccattgacggctaccgtgtcaatgcgctcgattatctgctgaaacctatttcgtatgtcgatttcctgcaagctgccaataaggcacttcaatggttcgaactggttcagaaaccggaagaaatagacagcatttttgtaaaaagtgactacaaactggtacaagtagacttgaagaaaattatgtatatcgaaggactgaaagattatattaaaatttatacagaagacgctcccaaacctattctttcattgatgagtatgaaagctatggaagaacttctgccgtccagccgctttatacgtgtacaccgttcgttcattgtacaaaaagataaaatacgtgtgattgaccgtggccgtattgtattcgacaagacctatatccctatcagcgacagctacaagcaggtcttccaaactttcctcgacgagaggagctaatgtttagctgttttatcggtaaaaaagagaattttgtcgattatagtttgtcagaatatgatttatgcgtacatttgcaccgaacagaaaagggattgtgaaattccaagaatagaatagtttagttaagtctagtttagtttttgtgttgatcggaagcctgcgagcgagcatgagcttccgatttttattttattgatatacagtatattaaaagcacaatcgaactatttttcctatcaattagtagtctataatagagagcaaaaacgtcacttttgacgctataaaatggtcggattatggtcggaaaattccccgattagaatctgattataagtaaattacaataggatgttaaaaaaataatggtcgaaaacgccatttttaccctaaaaacacaaattatggctacattaacattggtaatagttcccgcaaaaaggttatcagacgggacacacaaaataagaattcgagtcgcacacaactctgaaacgagattcatcaccacggatatagtggtaagggaaaacgagtttaagaacggtaaaatagtacaccgtccagacaaggattttctcaatacaaaattacaacagctatacaacctttatttcaagcgatacatggaactggactaccctgattcgctcacgtgcacgcaattagtcaaaatgataactaacccgttaaacggagaaaagcatcgtaagttcgaggatatcgtggatgaatatctgtcccaaatagatgaagaagaacgtaccaagacatacaagctctatcggctggccacaaacaagtttatgcaattcatcgggaacggttctctcatggaacatattacccctatcagaatgaaccagtacatatcatggctcaaaaagacaaagctgtcaagcaccacaatcaacatctacataaccctgctaaaggttatcattaactatgctataaagatgagatacgtcacctacgatatcgaccctttcatcacagccagaattccatcagcccaaaagagggaaacgcaaatcaccgtcgaagaactcaagacaatcagggacgccaatttagagcattacaatctcaacgtcacacgggacattttcatgcttacttattatcttgccggcatgaacctagtagacatactagcatacgatttccggacggatgaaataaactacatccgaaaaaagaccaaaaacaccaaagagggggactccctgatttccttttccattcccgaagaagcaaagcccattataaaaaagtatatgaaaaagaatacagggaaaatcatattcgggaaatacaagaactatacctcctgctataacctgctggccaggaaaatcagtcaattaggcaaggtggcaggaatcaggcataaattcaccctatattcagcccgcaaatctttcgtccaacatggatatgacctgggaattcctcttagtacactggaatactgtatcgggcaatcaatgaaagaagatagaccaatcttcaactatgtcacaataatgagaaaacacgctgataaagcaatcagggaaatacttgacaacttgaaaaatgaataatcacatataaaataaatcactaagaatttgcataataaccaaatgcttattatctttgtagtgtcaaataagagttcttaattttaatgtttaactgatgaaagatgaagaaaaaaaagaattagaacaagagtatgagaatttaaaacttctcgcttcatttcacgaggcctatggggttcctgaaaatgccaaagaacgggaagcgcttataaatgacatactcgatcggatgaacgaaatccaagagaaattaaaaaagttgtaattaacatccctcccttcggggagggacaaacattaaaagctatgatagattggaatgattgcctgccaacaaaagaaatgcaggctgactttgaaagattcaaagaactaaaaaccacagaagaaaaagaagctttcaaaaaggaaatgcaggataaatataataagctaccggaagcccaaaaggaagcctacaaaaaagcatctgaagctgggctaaaagcaacagtaaatgcctgcaatgattatatagaaagagcggaagaagccatattacgtgataaacttggagaattgcccgaagcaatctcattcagttatattgcaaagaaatattttggtaaaagtagaaactggctatatcagcgtattaatgggaatatagtcaacgggaaaaaggctcgctttactgacaatgaactcaaaacgttcctgaacgctttgaacgatgttagcgaaatgattcatcagacatcattaaaaatcagttaagctcttatttgacaccatccctgcattgagccgatgcagggatttttattgtctaatcgaaaaataattgtatctttgcaacatcaagataatacggacataattcggattattttggtttgactttggtgagggggtggttcccctcactttttttatatccacgatcgaacttttcatttatatattagtactatcttatgtaagccttcttgagagtgtgttgattgtgtgtgttgttgatcggaaggattacaaaacaaagaggtagcttatttggctacctctttcattttttccctgaatggagtcatgattgtaattattctccatatatttattgattacctataatctttctaaaatccaattctaatttttcagatatttcatcaagcagagagtctgattttgttatcaaatctctcatattttggcatagttcatgattcttattgtgttcataatcttctttaaactgagcatacatatcaatatttcctctaacactcttaaagaaagaataaatatcatctcttaactttggctcaaaatatataatattacattgaaaatattcataagcttcccaaaaggcttgataactatctactatttttttattagaaggctctccttcatatattttttcataaggacttatataccttccaacagcccatttcattttttgaaatttagaaaataagactccagcagattcacattttttttcatgtaactttgaaaaacgagtttgtttcttaaatatttttaaatcaagtcttattcttaatattaagaatataataaacaccactcctgcaatagttactatggtaagactatactttccatttaacaaattcattataatatctaaagcatctttcattattatatcttttagttacgtcacaaaggtaagtttttaaatttatgatttagagagatgtcacatcaaattgcaaaatagaaagccccggccattcggtcagggcatgatttccgccgtcgcggatttggaattaaagggattccgatgtaaaagtactacttatttctcaacttggatactctccatccacttattattagaactataatacctatataaattttatctttatgtaaatcccaccatgacagttcaataaccttttccttttgcttcagcactgcatctactttataattcaaagaatccagactattagaaaactgctgtaaagtgatagataatgtttcatcaacttccgtccgttcctggtcctgcttggatgcagtagtagtactttctttaatcggatgttgttttcctgttgaatccggagcagacaagtaaactgttttattctcaatcttcagatcactcaacttgtcagtagtaaccttcgtttgcttacttacatctactcgcagtgattcaatcatgctttgaatacgactcaattcaccggaatagtctatctgcttttgagtttccatattccgggaagtcttgcaggaagcaaaccatattcccgccatcatgaacatggttatatagattagagccttcataagcctagatatttaacaataccctcaatatgaatccgagcaatatcctctttgccctcccgagacaaaaggtactcaacatcctctttattgtcctgaaagaagttttcgaccaatactgccggacaattcgtatcgcgacagatagcaagattctgctgccagtatggttgtccaggcataggtttacggaccgatactggaatactctctgcaacctctgccagacaactagccaacttcttgctattacttgatgcgttgttagatacaaacacactccatccctttgcgttcatccaatttgcaccggaaccggcagcattacaatgaatagaaactaggatagccttctttcctgtctctttgtagattgcattagcccgttggcaacgctcaaacaaaggaacatccgtatcttctttcacgatccgttctgcatcaatacctttcttgcgcaattcagatactactctatcagcaatttcccttgaatacgcccactctcttaatctcccatctggcgaacgtttaccaggtgtattttcaccgtgaccattatcaatcaatattttcatatctttcctctttatctagttcgttttcgattctatcaataattccttgtacatgtgtaggcgtagcccgcttaaattcaaaacgtattacatggtaaattatacgaaaccctttgtttctaggataagcaataatcagattcttaaatgcgttctgaagatatacataagaaaatacatacgtaatagtcttaataactaacaatgagttctcaccatctcctatcaagctcataaaggagaagactacttcaatgattataagatagaggagaagttcgaccaaggcatttttaaacttatcccacttaaagtttttacaacgtataattgaaacaccatcagccctcattccgcaccaaatattaaatccaaacattacaactaatgctataagaaaacctttagtcggcgttaaataagcaagaagagaactgaacatcgaaacgaaaataattcgtatctggtctacattaaataactcatataaccatctcataatattaatcataaagttactaccaatattgaaaacacagtaatcagcccaggaagcaaaacagtagctaatgcgtcaagccaatcaaagatgaacccgcactttttctgaatgtactcaaccactattgcggcaatggcggttgtcgttaaagaaacaatagcagatttacagaaatcaatgcctaatagaaggaaacagaaaacaagcattacaacaaagacgaacatcccggctttgacgtgtgccggtcggttagattgcaaaagccaatcatacaatacttttatacccatactcatagcgtttaattattaataaaatattctgtatggaacaaatgtattgagtataataacgagttttacaaaaatggaaaatcttggaaatcaattctatgataaatatctataaaacaagacattataattttcactttttccataaataaaaaagggatgcttgataagcacccctaaacaaccaacagattgaactattaatccgtaaacatatacacggaaagatcaaccttttctatttcgtctgaaattgtatctccatacattgttagacacacacgataacggtcaatacttctttgaatctgttgcaaggtaggtttctcgggatattccgaactggcaaaagttaccagttcttcaccattctcactggtaccaaccacccggaagtgatgacgtacaatccaagttccgtccggctgttgctcgataggcttagcaatcccacgcggtaagatatttttttgatccatgttttttgatatgtttaattagttgttttctatggttatatttattcttcaatacaaacttttcaaaatgtccttcgatataaacatattcccaccattcaggaagcaacatcgctgcaattttacggcggatattgtacgttgcaaagtgtttcatcaggccataataagagttcatcgtactcacaaacttctcaacatacgcttctgcaaatccattttcagctattctattaaatttcctgacagcgttatatgtgttaccaaccaccctgttagatacataaattctaccaggcaaaatgaacgcccctacaaacaagactccttttttataatgctgaagatacagtttgcgtggatgcaaccgtaaaaggagttgttctttcaggaaaccatcaagaagatggactttggacaatatttcttccggtgatttcactacgatacaaaagtcatcaacaaagcgtacataatatatgaatcccagtatttccatcacgaaataatcatatacagacgccagaaagttggctatgagttgcgacggcaggttcccgatagccactcccctgtcaaggtcattatgaaacagacttttattactgggaagtttgtcccacatggagacgggagagcgtctgatacacttattttgtggacaatgaaagatagtaacggctagaaggtaaagcagacattcaatatcatcgcctttataattgtcccttacgaatatgttcagcatttcccataccaacgatttcgagatagacatgaagaaactgaacaggtcatctttgaaaatgtacgcatcggcagtataattctcactgacctcgactatcatgttattcagatagtgcacggcagacagacatccctcacctttccggcagttcttcgagacgttcccttgttcccgaaaacgttcctctaagatcggctcgatacgaagagcgatccagtgatggacaacacgatcaatgaaagcggcggcaaaaacctcccgatataccgggtaagtccgtatgaatacttttgaaaagtccggtacatattcaccgtaaataatagaataccatagccgcaccaatgcagactgataatcattataaaactcaacacaatccgtactcgttcttttctgcctggcacaatcttcggatgcttcgaaaatactgctaagaagtatgtcatagattatattacctgttgcggcgaggggacgaacccggttcgcgttctggcggttgttcgtgttgacgttgccgttgttgaagttcacgttccaactgctggaagccgttgcatccgctatcttagtctttcccggctcatcaccggggggatgcccaataaataattctaattgctcactcataatccccttggcgattatgactccggctttgcgacttgttgcgatccgttagctttttgccgttggagatctgcaaccgtttttttgtaccagccggtactttgcttaccgatactctctgcaagcagacagatttcggctgtttgagtcaggctggtcaaatgtcgttcttcacacactcttagcagtaatttcaatgcatcaaactcacacaaaaacttcatcagataatctgcacggtgctcaaggttcatatctgtatttgcataacggatatattcgcaacaatgaacggcaagcatcatcaactccgtaccaaattcataccggaacgccttggggaattgttgccgggcatcaatgataaggttcagaagcttatacatcgaatttgatataggaaggtcttgtgtaagtgccatgttaattttttaatattttaatgtatgtattagagggcgcaaagttaataactgtaaagcaattaacacaattttagctcaaaaaagtgaaaccaaaaagcccctaccggggcttttatttagttaaccctctaagggataaagaattaaagggataaagtgtttattgcggcgaggggacgaacccggcccgcgtcctggcgggtgcccgtgtagacgccgccgtaggtgaagcccacgccccaactgctggaagcgtcatattcggtactagaccaataccagtcgtttgtaaatatattttgattaccaaacatagaagttatgagctcattgatttcggttttatacttggccataagcataagttcacccaatgcgggcaggttccacacggttgtatcttcaattccgtcagattcaagcgtacaggctttataggctctggcaacttcggcggcaggggcaccgacagttccctgggtgtccttgacgcctgcaagggtttctattataacatcggtattttctttgccgtcgaaggtatcatagagtccttggttaccactgccgtagtttttcaggccgcgcaggtcggtaccgtagccaccccatttgaacgttttgttgccgcctgcgtcaatgcagtcgcttttggcgataatgaactggtggcattcggcgcgaagtcggatgccgatacggatatacttggagcggttattcgcgctcatggagttccattcggaagccgtgaaaaagacttgttcaccgtcttcaattcggagcgtagccaaagaaaggtcaagaagcgtacctgaccattgcatatatttggcgatgtcgcttgcgggggtgttttcattcacggttgtaaaacctattgattttaaggcttctatctggtcttgtttattcaagcgcagaagcatggcgttggcgatatttttatccattttattgtataatattaagttaatactattcggaagcaacagctctcacatgaagaagggctgaatttttgttttgattcgtaatacgcccggtattcagttcgaacgcccaggcggagttagtatcccaaattgttgatgaccagtagtatttatcagtcatcagcatactgtcactactccaaaaggtacgcatcatctcattgattttatcgcggtagcggtacatcagaagcatttggccagatgaaggaaggaaccagttggattcatcctcgataccgtcactttccaaagtgtaggcacggtatgcacgggcggcttcggcagctggcgcaccgatcacaccactattattttggtctttcagagttgcgataatgaggtcagtatcttcctcacccgtgaagcagccatacatggcgcccagtcctttttgattcaggccatctatggctttgccctgaccgccccagtagaaggtggtagtcatgtcggcattatagcactcctgggcggaaattacgaaggagtgtccatgtgcccggatacgaagaccgcgtttgataaacaactgtttgttggtaaccgtgagggaatcccattcctcacgggtgaaataccatttggagttatccgagatgcggttacaggcaagattcaaatcaagcaggccggcagcccacttgatacgttgtccaaattcagatgcgcgggaattctcggtgacatccgagaagcccacggcgttcagtgctgccacttgtgcctgtttattcaagcgaagcagcgttgcgctttgttcattcgtcatagttacttgttgattaaatcattaatatccatattgtcttcagcgaagcgttcgagatattcttcgtaggtttcgccgttataatattcaaggacttcattgatgttgtccagcgttacgttatcgtagtacggttctccgccataagactcattattgaaccagttgatcaggtcgatgtaggcatctatgacggtaaggatgacaaggccgtcgataccggattcaagggattcgatttcatccgtttcacggataactgtcagttcatacgtgccgttgactaccggtttatcctgtctgttgccgtcctcatccattccggcaactccatattcgagaatggcaagaagctcggagccgtcagccttcagtgtcatgttcgagatacggagcatggaaagtttacgggatgccgtttgtgaagcgaggacgtcacggagcatctgaatggcgtcaagtttaggcgacgtttcaagacgcaggcgttggacgttcggcatggattctatttgcaggccggacggggcggaaagacctgtataggtcagttcaggaagaccgacaaaacggaggcttgtcattgttgctggaagagagatgtcattaatcggagaagtctctgcaagagtgatgttctccagtttgctaccggacgcattgatatgggcgatacgtgggcatttgtcggtgacgagcgtagcgatttgtgtgttccggatatcgagtgatacgaggaagggcatttcgccgcagttcagcgaggtaagcggtgcgtaagaaccgatggattgttctgtatgggtgtcagagcccaagataagggtttccacaagttgcatggcggagaagctcaccgtacttgacagggagatttcagacaggtcgagcagcttcatgcggtcagcctgatagatatacagcaaggcgccttcctcatgtgagaagttggtgaatacatattcttcgcccgcttcaaggaagcagctttcggaaaggttgccgctagcgtcattgccgacaccgaagtaaccgtttttagcagcgacaatccggatggtggcgtttgatttggaagatacgcgcccggaaattacaccgctgaagaaatcaccggtttggaaatagccgtcacgaatacgccaacgtctttcgatgaaagacggaagggcggtaagtccaagaccttgcagggcatagaagtaaatagcatcagaggtggcggtataggagatgtatttccgttcaccgtcgtaagaactaaccagtttctgccattttttgagccgtttgtcaatgaagaaatgcgtagctccttcgggtgagaacgggtgcagggtgacgccgtcaatggtcgcctgaacgttacgcatggcggcggcaacggtacgcagggagagttccgtaccggatgagtcagtccacactacttgctggagatagatgttattaaacagaacggagccgtagccagcataagggttagtgaatgtttcatcgctcgtccggttggggtccacctcggcgtcaaccgtgcaaccaccgtcgttgtccttgctattgagcgtatcacagtcatagattttattcaggtacatgcgcatggcatcctcggagctgtacacaccgtctgttacggaagcatactcttccaagaaccacatcggctgcatattcttggcgcgttggtcagtggcggcaaggtagtcggtgaagatgtcataactcaagacactttctgggcaggcgtatttatacaggttttccttccatgttctttgccagttcccgcctttggagtaatcgcaggaatcacagaagcgcaaccatcggtagaggttatacggcactttcttacccaaagcgtaatcaatggcgagctggtcatcatcgacaagcgattcaaagtagtaagtccatgccgggaaggtatcagcagagatagttccgttatccacgagtttttgaacccatgaggacttgtccgttttcatggccatcatatcctgaacagaaccgacgccctgaaaccagtccataccttggtagttaagaagttcgaagccttcaaccggattcaggatgtcaccggtgacattccatttgccgttttcatacttcatggaaccggactgctttttccagacaccatcctggtacctcattatccggtatgagctgccacaatacagggaaagcaggtacacactgtccgtatcgaggccgtcagtctgtttgaagcgtatctcaattgcgtctaaagtttcgtcaggagtaccgaagaactctatgaagtcaccataattcaggcaacctttgttatagccgggggtatctttgaagccgagggcaaactgttcccctttgtcttctttccagttgcctttggcatggaaatagacgttttgcaggctgtcatccttacaccgataggtggctaccgggtgattggcggtagagtggttcatctgcaaatcttcgatatgcaagtcaccgctgtcaaatgttccgtcaaatgcacgttggacaggtgtcatatagttaccacccaaggcacggtatgtaacgttcatcatttcacaggcgccgcagtcgttcgcattgccggaatcggagtaatcgacttttacggtaatgacatcgaccgggattgtattatcaccgacctgtactttgttgatggcagccaaggctattgcacggcgtccttcctccgtcgtatcgtccggattaagtaatatgattcgagtgtccttgtttttgcctttgctcttggcgaggtagtagcgtttattctttaccgggcgtttggcagaggtggttccctggttgcgggtttggacactcacggccttgaagttacgccacgggcgttcggggtcaaagtaatagagcgtgatgtatatcttcgtactggtggaagtggtgccgtccagtgcttctatatcggagccttcataggggcattcgacaatgtaaggcataccgcgtgaatagatttcggcagccgacgggcggctttgggtactaccctcggctgtctggcttttaaggatgtcctcaaaggcgtattccttcaccattacctctgtatcggtcagacggacaaggtagttcttgaacgcctgtgcccattccatataggagttccaggccatcatgtaataaagatacaaatcacccagtttgccatccatcgttatatacttggtctgaatcagggagccgccgcccggaacataaccaaggcaggcgacttcctcaccgctgaggaagagtttcatcatggaataccgtgtgccgtcacgttcaacgtagttgcttgcaggttcaacaaccacggctacggttatcttttcaccctgtcgataggcgcgttcttcacgacgggaaacgccattgttacagaagatgccgaccacccggccggtgacatagaagccggcaccggacgtttcgtcatagcagctaaggagcagggcatcatcatcggtcacgttcttggaagcgaaagcgaactggatggcggcaccgttggattcgatggacgagccggcaaacggggcatggtttaatgacacgcccacattctcggctacgcgaaggcagttctcacccaagaatgtgccaaaaccgttggtagtccagttggcaccgtccactttcatttcataattaccgctgacaatactatggtcagtttcctgattggtacgggatgagaagtcaaagttatagatggcgccttcttttatggcggcatcaatggcggaaccgctaactgtcacccggacaggttcgctagtcacgtccttgcatacggcagtatagttgaccgtatcggtgccgtcagccttgtagccctgcagttgttgtttgacctgataggttttgttacgactggcagcaatttgtgttacctgcacgttattggctttcacgctgacgggtgaagtcatttccaacgggtcataacaggcaacatcaagttctacggtttcgtacagtcggactactccaccgtttttatcatcgtatctcaaggcaacaagaggtgtggaactattcgggtcaattaccatgacagccgtgtagatgacatttcctttcactccggatgcgacatccgttccttggatgcgcaagggataggtaccgtgttctaggccgagggaagcagggcggattacaacggagtgcgagtagttgtcatttacaacggtggtagacagggattgccattcaccattaatcttgatgtcaacctgggcactgatacctttatcagaggtgttgtttccgaacttatagagtggaaggctgaaactttcagttgtcggagtaagcagagtttcaggggtatagttgagcacctgcacacaggtacaggtaatatcaacagctgttacattgacattcttggaaccggtattgccgctttcgtcagtggctatcagcttgaatttccgagtaccggcagccgtaaagtatgcggtgaagtccagttcaaaggagaagtccttcatgtcaccggaagatgctttgttgacggtttcagtccagacggtaagcccgctttcacggtctacgagttccagtttctcaatcaggttgtcagaggattcgacaccgttcgaggtcacggaacgaatggcggcaaaggttcgtagcgtggagccgtaagagccatagacaggtgtcgactggaaagcaatggcaacaatggtaccgccagtttgaccgccgccacccgtgccgatagcgaactgcacttcatcaccaagggtttcaccagcagcgttcttcatctgaagttttacgatgccttctgtttccacgtttacgtcgaggttggccggaacataggcataggcgccaccagttgaaaaggcatcctttcccccttctgccggttcatcggaagtttcaacaacggaaccgccaccaccattcccgaagggtttccaaagagaaggggtcgcaaaatcggacacagcaccctggaactgccgggtttccatttcatactcgcctgttttgtaagtaatgatgagacccgttcgctcatatttgacgccagattcctgttgataggagacaatggcggcaatagcggtttcaagggtatagtggccatctttcagagggcggatctcatcaacaatgacgatggggtgtgttacatcgtcggcgggcgtgccgctcttcatatcctcaagggcttgcttatcctcggcggacaaaaggccggcttgttcaagggtagcagaaggcagacggaagctgtcgtccgtttctttaccggttgttttggacactttcttaaaatacacattgagataggaagcgtcagacaggacggagaaagaacccggtttgattatatcggaagggatatttttcattgtatcttccaaagactttccacggttgccggggaaagcttcttcttcaccttccccaagagacaacggttcaggcagacattcagaaggaactttactttcttcgttcaaaggagcgataccgttcgcttttcctatcctttcctcaaagtcatttattacagaggtccatttgccccatgtaacactctcattggaaacaatacctattcgtgagattgtacaaactgtacctaaatatacaccttcggcattgtctgacatggtagccagttgtatacacgaagtgaatgattgacaaaccttatcaagctccaaccgttcaatttgtatatttacaggaatcttagacgaatcaacagacaaaatacaccgataattcccaatagaagaatccccggaatacatcgtttttaatttatctttaaagctaccaatagtagtaaaagagccaatacttttaaatgggtcagtcaaaggattggatttatcagacactcctgttatacgtttcaataactcggcgtctccatccgataaatcttttgcaatcttattgacattctccactaatgcatcaaaatccccattcaccattttagcaatggtacttgaaagtaaatcaatagatattttccgaccgccactaacttcaacgtacatatctttggatagctctgttgtatcagtcagttgctctattgtaagactgtttgtcttcaacgcttgtaacacaaggctaataatctgttgtttttctgtttctgtcataattctcttttttaatcattttcatatacccatacaagctcaatggtcataccaagattatctatgtcgcaatcatagacattatcaagataaagttggaactccttcagagcaccaatatctccaccgttaatacctttcaagacacatacaccatccctactgattacactcccttcaatgaggttagtatacgaatctcctttatatagtacagcacgcaaatttatcgaaccgttgtccaaatcgttctttagtctatccagtccattaactgtaagtttaccgtaacctcttctaccaatatacttgttatctatgtcagtcgtcttgattgcaatcaaatcccaatatgaattttcatcaacacctaggtgatgaatactgttgacagtaaccatagtatcactattaatagaaactccagtattaggaatagccttagtcatattgatatatgctccgacctctgcaacctcactttctgaaccatacttgatactacgcattccttcatcatctgctatcctataagcaccgctttgtacacacctcatagcaagctggttattccattccaaaactggattcatcgttcttaccttctgtaacatttgattgaacacaaaactcttcaatccctctatttgctggttaagttccggaacattactttcctttctggtatatcggacaccatcaaagtagacgtaattacagcataagacacgattcaataattcagcaaaccacacagggcatcccatcccatttccaagcgtgaataatactgttgtatattcgtggctgaatagctcaacaatatcctcatcagaggtcacgaactgctcattatccacaccgaacgtccatccgttatctttgaaaccaccaggaacgcgaaaatcaaaaaagtattgcatcccatctatccaccagacagcatcaagacgctgcttattatctttcattgaatactgaataaggctggtttctgataactcacattcatcgtccgtaactttaaaaatctcactcgtattcccattaactgttacagtatagtatccacatggaagcaatgaaatgttatagaaataaagaatcttatcatcattcatcttccatgagcttaatgatacaggtgtagatatattacttaaaagattattaatgtatactataggctcctgctctttggctgtcaaaatcaattcaacaaaaatcctgtctgtacgtgcgaataattgcacatatttactcttcgctccaaatttatcggtagacggagaaaaaaacagtggggtaaacgggcttataatcatatttctaggcttttgttattgaacggacaaataaatcatacttcactccctcgtttctctcaactgtactactcacctccttgatgtagccctcgtaaactagatcatcttttaagattttaatcgtttcatcatctgttggtggaatatcttcattataagttgtgaatgaaacatctccacaagttataataccactttcaacgttaaaatcatctttcattcctataccattgacaacaacatcactattaccgtcagaagaagaataagatagttttttagtgaacataccaatatagccggcatttgcttgcaatatgcctccttgccaatacatggtattaaacatcgtttcaggatcaagtacgccacttatttcccaaccgctccttataagcctatactctttatatgtttgtactccgccattatcatgtaatgtagtactggcacaaacaaaaaacacatcattgtcactttcactatccgttgtatcttggcctctcttttgcgataagaattcaattccataaacatcagcacggtaagggctaatcaactctaatacattatcagttatatcaatgccagtagtatattcagtagtaaatcggaattcgtcacgaccattcatactttcatagtcctgtttatcatatcctaccctaaccaaagaatatattcttgatgaatcaaccttatactcaaaactagaaaagctgctatttaaatcctttacattgttatcactaaacaatttgtcccggtgtttaaaaaaaacagtgacaccattgatcacaggcacaaagccaaaaactgtttccatccagtttttaaactttgtataagaagtatatagcttagcttgggggattccacgaatactttcagcagctaatatcacgcaattatctaacctttcatcaacacctgaagctatttcaccatagataccttcatttccaccattcatgcttttaagcaatcggtttaacacatcaataggtcttattgcatccacatagatagggttagctcgagaagtaaagcgtgtctcaaatttgaaattacgaaaataaatattgccagtagaagcattaactctgttaaatgttaccttcaaatccaaaaataaagcctgccctttagtcagatgaatcttgatggattcattcagattacttggagtaacatcccccttattatacccccatcttttcaactcgactaaacgaccatcttcgtaacgcccacctagaacaatttcagctttagttgtatacgcatcactataactgatatagtattcaaaactaaaattcaatactatatcaatgtcggacaaggctttaacaaatacatttggatcatctttcgattcctgtggtgcatcataaaactcaagaggtgaatcccgtgacggaagttcaccacctgaaatatataagggaagcgaatatgttatagcttctacatatattcctttgtcaattacaatatattgcaaagaagcatcattttctacagtattaccacctaatgtatgcggttgactataattcatacttacagaatcataataaagctgatatacatcttttatctcatctaccgaatattcgtactgcgttcctttgttagcctttatgatattagcgacactatcatctatcgaattaatagaaacagtatttccatcataggtcaatgaaccgaaatccagtcggcaactgaagaattcttcataagtatgagaattagttatagtataaacagtgatactagcattagaagccaggtatttgctcaaatactcctccaatatgagatcataggcttctcccacaaactggaattttgaagtaaaggttctagttattccttcaagtccggagcgtttacgggaaaactttatttcatcccaattctgaatacaagatttgggaatatcataagaaatactatcaacggtaagtacatatttacaaagcattttaactccttttgaacgttcacgagcaaatatatagaaaaagccaaccggtttcccgattggctaaattcttgaaaatcatgctttgctaaaatgcaatataactatctgtttttcaaaacaatatctataccaaggaataaaaaggacttttcaatgtcctacatactaatctttcccttttaaaatgtcatagaaatgttctacaggttaaatatgcattataaaaacaattatattaatgcagaaacagtacgtacccctttaaatagtttccctagttccttatgtttagtaaaacaccaaccatgaacttttaaaaataaatctaattctgcttgtttaggtttagccgtatatgctcctaatacattcttcctatttgttttaaattcaatatctgacaattttattgccggtatattgcaaattgtatatataaatggagaatcaattaactgatatattaccttatatatttcaggaggaatgtaatatgcatatttcactagaatttctcttcctccatctatcattctttgattctcggaaagtaaatatctttcccaagatatttttggggtaacaggagcaatagcatcaagttgcaaagaatcataaattcttcgaaattcatcttccaagaaaatacctttatctgttttaggggcataatatccacaatcacggtaagccgtttgccaaaagctaataaatttattacaccaaagagttacatcattatatgccgcaaactcaagcggttttttctttctaacttcaattcttcgatataatctatcaattaccaaaactgtcagagcagtcgtgctcacatttacaaaaaggcttattcctatattattaacaagttcttcttctctcaacatcaatacaaaagaaaaaatcaatagtgataatatcactaatattatcattttatagtcattccaaaaatctttcatatctattcttttcaaaaatatatctattaatccaacaataatttattcaccaattcacccaatagcattaaactcggatatattacaaatataagttttttttgtatatccacatagaatatacttccataattcattctattgctataaatttacaaatataaagaccctcaaattttgtaattcagaacactttgcaggttattatgagcatatataagttaccattttgaaaccttactcattattatcctatttcttgaagtataagcttcctgccagaagaaatacgacttcttacagttccaacaggaatgttcaggatttcacttatctcatcataagaatatccactagcataatacatcacactatcaatacaacgggattttttagcacaccgttgtattgtggaaaccaaatcatcaaacagtattgaatgagctgtacagttagaaatggcacttccgtctaccatatcaagccctgtaaaatgtataagggaatttctattgtatcttattatataagtattcctcattataataaggcaccacggttgaagtggtttagaacaatcaaatttatcacgattcacaagtagcttataaactgtatcaccggctaagtcttcagcatcttgcatggaacagcagaattttcttgccacctttaatatccaaggatatatttctgataattccttttcaaagtccattgtcagccctccttattaggtgtatcttcggttcgccattaatgcacctttccacgtattcccggtgcatgatactttgctcgtgcatttccttagcagaacgctcgattgaactaataagagtgcctatatcggggggcaataaggcaatcattttttttacctcggacacttctgctgttatccgattacacttcgtctctaatgtacgtaattctgacaataaaacattgtataaatgcctatttatacaatggatgctgttttttctattcataaaaaagtcgtttgtgattctaaaggagatgtacaaacgactgtatgaaataattcgctttaattaaaaattaatcgaattacagcatatatgtaaataccaatattatcatgtgcttctttttctgaacgatatttcaacatcggcttgatgaacaatatttgcgtagacagcagcattaattacacgggaatctatactcattttaaagaatgtcattagaaaagcaatctcggcatcgaaagaagaacgaatttgttcaggagtaaccttatttcctttatgttcctcactgcgtctttcctcattccgtttttgctcaaaaattgcagaatgaaacaaatagtcaatcttcgatgttacctgttcatcactcatattccgagaatctacatttagttgttccaatacctgacgaacatcatcataaaagccaagagaaacaagagtctgacatatacgaaggctcaatagtttggcacgttctttcagcatatcctccttgtccattaccatagccttcatatttgaaggattaacaatacttctgtattcaatgagcaatttagatgctatctctttaagcgtgctctctgacacaaattcgcgatccgaaagcaaacaagcatagtttccacatgaaagctcaatgaaatcattcaatgttatctgatttaatctttcaatcatgactatttcagtttagataacttatacagttcaaattcacggttagaagcatcctggcgttgcatttttagactcttcattaaaaggagatttgttctatcaacccttttttctaaccgggaataatcattgaaaacaatggtgttaccggaagaggatgctaaatatgtcggtgaaaatgtaggaaagtcccaatccggcatatcaaaattagagatatctaccttatcaacatcaggaaagacttgcgcacctttaggaatatcaactaaagttggagtatcaggagtaatccatgcttttccggaatacatgataacttcatgtttaccggcatcaccaaccaaagcagcaccgccggggtgcctatcattacctttagtaccttctgcataagaaggaataggagtggcaagaattgttgctacttgcatagcccccatcgccccgataacagcagccattacagcaccggcaatcggacctaactggaaagcttccataataccacgagctgttgcaattccagtttctgcaacttgtactcccttatgccaaacagcttgtttatgggcaatctcttgcttttgtttttccaactccttattcttggcttctgtctgatcctttgctgcccgtttacgcgcttccgcttcctcttcggatatagctccagactctgccagattctcaattcgttcaatatcctcatcatacttttcctcattagcttcccgctcttcttctattttctgaatctgaccatcataaatagaagagactaagtttccaatagctcccacagcttgagatgcagtttgaagccattttttcaagttcttctgacgttctttctgtgctttctcatccgctttagtaactttattgatagcatctatttccgcttctgcttcttgctgggaaaggtccgctttcaatttctgtaactgctctgcaatctttgccctatcctctgcactcaaattttcgtttcgaagttccaactccaacgcatcaattgcagcttcggttgttttacgtacataatctaattttaactgatactcaagttctgcatactcttgctgggttatttccttagaagctaactgttttttaagagcaagcgtatccataacatatgcagcatcccggatttcctgctcatgcgccgcattctctgctattaattgcacctgatcggatgcatgtctttcgtaaagttcttgtttcttttttgcatatttttcgtcaatgagaaaaacatcttcaccagttttctccgctgcatcaatttctgcttcacgttgcaattccaactggtgcaatttcaaatcaagttcttcctgggaccccttttttacaacagcaagagcgttctcaacatccttcttctcacgatcagaattatacttaatagtaaactcatctagcttttcctgcatttccttagctaaattctgacgtgtagcaatttcctctttgctattacccttgacggcagcaatcttcttcgagtaagcaacaccaattttagcaagttctttctccagtccctcatccataagagctagttctgactcctgataagtttcatgaattttcagcttctctttgagagctttttcctgttcacgtttttctttatcagtaaggactgttatacctgaaccatttttgtcgttaccctttggacggaacttttctgcaatcacatcaagtccacgattaaactcatcgctagatgctattttgaataagtttttagaaaattccaactgagccttatccgctttttctgcttccgatgtgtaatagccaaacattttagcagcaccattctttatccaagacatatcttcaaactctgatgttgcatattgagcacgagttttcatccgttttaaagcttctctctcttgggccgttacttcaatacgtttatttttcatttgaataacagcttttgtgtatgcttgttcctctgtatcaccagcatcaataagcctcttatattctgcctgaaaatctttttctacttccaataactttttgttcgcatctttttttgcaagtgttctaaaattataatctatcttttctattttttcttcaggagatttcaaatcattggcgatacctcttattttatcagccatccaattaagaaactccttagcaggtcccgttgactcggagaaagaaagcataaacgcttcccatgctgaagataagttagcaagagctccatgaacattatctcccatcgtgtgagccatatcgcccaattcacgttctacaccagtaatctgttctctaagtggtaatattttatcaacagcggtgagaaaggcattaaaagcggcaacactacgcttatcagttaattcaagagtagtattcaagtctacccctttttcttttagcgatttcaatccttcaactaactcaggcaatgttttaacgggcttacctaacgcctttgccagctttccattactatcagctaaatttagaaaaacattacgggtagcagtagcagccattgaagcatcaaagccggcatccgataatttacccaacaaagccaaagtatcttcaatactgaaattaaaggcttttgcaaccggtccaacaattggtaatgcagtagcgagatatgaaaacgacaatgcgcttttggttgttgcgacagccatcgcagacacatatctttcagtttctcttgtatcagcattaaacatacgaagagaagcacctgccaatgaagccgcatctgctaattctgccccggtagcttgtgcaaattttagaacgtgctctgttgcatctaatatttcttttcgagtaaaacccagtttagcaagttctatttgcaaatccgtagcttcggatgcagtgtatttcgttgtagcacccaaacgttgagcatccgcagttaactccttcactttatcagaagtggttcctaatattgcagcaagcctactattagctaattcaaatttaacaatatcacctactccttcacgcagttttgtaaataaagcaacaactccactaacaacagcttgtgcaccaatatatccagctgcccacccttttaaaccagcaccaactttacttaacccaggagcaagctctgtattaagcatcctaccggcattccgggcaataacacccatattctgcatggatttattaccgttctgtatctcaacccatgcagcctttacttcttcccggtatgcaccgatagtcattttctgttgactatatcgatcggaatttcgctttatgtaatcggtattgattccgattgtagaattaagacgggcaagtgtacgaatatagttttcatccgtatctttcaaaacatcaacagccttttgcagctgcttattcatttcctttgcttgtgaacggctatgtacttcctgattagtcaagataatagcagttctgataagttttaaacgttcttcttcagatagaacagctttcttacgagtagtattaccggcattctgcgcttttgtcaagttagcttctgctttagcagccttttccaaggacacagcattatccgagtttgctttggttagtttcttcagttcagcagcagataatttctctacatttagcttttcctctatcttcttactgacagtttgagttatttcagactgtcttctaagagcttcggttaattcagcagatgcagaaccagccgtttttgcttgagtattataaaggttactcaacttttcaagatcagcaacaccttctacatttagtttcaaaccttttgctaattctttggccgcattaacataatcagccctcacacgctcaatagtattatcaagctccaccaatttctgcaaatcgttctcatcaacgaaatcttttaattttaaatctgccataattacaggtaatgtctatattcaacaatctttccttttatctcaactcctagtttatcaaaagcataggtaccatcttctttctgataaacgacatacatgcaaccatccaagacagctgctttctttgcaagatcactgatacgttccagttcactctgcatctttcttatttcgcaactacaagccattttctaccgatatccacattctgaaaagaaacgttccatccagggacggagatacataatattaaagtactctttagctgtatcaccaatgcctaaaatctgctcaccgtatttcttctcaatagaactaccgtccgtaaatcctttcgttgagaatcgaagcccggaatcaattctatcggcagttatgctatcatagaaagtaccagtaataaaaaggttaggtacctcaaccggacgcggtggcaaataaagcatctcacttctaagaggcggagttatcctctccttccatcgtttatattgttccgcacggttctgccagggaccgggctcgttaaaataggtgtcagtatcataatcaggattcaatagatgttcggtaccgtccaagccggaatataattgttcctgaatacaatcaacgagcacattcttatgttcttccatacacctaatacattcctcttcaaacccggatgcaatggaatgaataactctatgtaattcatcaaaatctgccatacagtaaaattataacgggccgggctgtaatcacaccccagcccgtcggttacttagttatcgcatcgtacacttccgagagcttcttcttacggtcagcttccttcagttcctgccacacgactttaatgtgtgcattaataaactcttccttcgtcatgcccttcacagcaacctcgacgaacgtaacattatctaccttcatgacacctgctcaatacctctgattcctttttcatacaatacagaaggagctttcaacgaaggaaccgccccggctttaggaacaatggtaatgataccatccgaatatgtagcagaagttacgttattcataacttcagcagcaccatcagcaataagactgccaaattcttctgtacggtcataaccaccaacaacttcaactattttgtaagtattttcggcctccaacttttgaaacacaacatcaaccaagcctttaacgaaattcttgggattgaagtctaactgcacgtagtcaaagtgcaattggctgtcttccacatcttcatgtgaaaaactaacagtcatcgcagacttagcactactggtcgggtactgtgtcacggtcgggtaaacagtagacatcggaataccggcaaggatatcagtgtcatcattataaccgatcaacatattatcctgattccaaaagtaaacgtcccatcctttattggcacatttcagaagctgggcattcaaaacctcatcaaatttcttcaaagtgaaggtgtctgtttgagcgctaagcccgttgtattcacttgcaccgtaccctacaggattaacttgaggctctccaccattcttggcatactccaggaatggcaaaatagggtaaatacgcccgggacggtctgcatggcacaattcgagcaacttctcacctgttatatcagcagggagtttgacaccatgttctgtcaagatagcacctttgacctttttccagtcaatgctacaagcagaactaccagtgttcatccgggaacccttacacgttctaatctttctcattttcttctacaattaagattattaatttttatttccatcgagcgtatatttatggcatcaatcggctcgctcacagcctcaccggaatctgtataggctccgtatctgccatatgaatagttttctgaataactatgtttcactttttcgtcatagtcgcagtcgaaccgagaatcttcatataatacttccaataaacgtttatagattggccgaaggatatttttaaaagatgtggttctgcgcatctcattgctccactctttacaagaagaacatgctataattaacgaaacctttgcttttgaaaaataatccgcatcacctctatcctcactaattggagtgaatagtgcaaccaatggaaacttcctttcagactgggcagaagacttactgtattcatctaaaatatctttgatatattgactgctaccgaagatgtaattcaaccttggggacttcataactttagttccccctttcccatttggatagagaatttcaagcccttctggaagttcctttacaatctcctcaaacagttctgttatatctaaatctatcataaattgaaagcattaattggggtcaaaagattcttggttattttcacatcgaaaggacaatcatttgacatagcccattcaacaaactgtttattcttctctaccatgctattccatgtgcttacttgtctcttcaaaggagctacatattcattagcgcatttcaaacggacaagcccggttattgtagcttgggtgtttgcatcacgaagaatatgatataatacatagtcagcgaacggttcacacagcttctcgcacaatactgcatatccggactgggattcttccttctcttctgaaatatcaacttcatctgaagaatcttccttttcccgttcaataagctccaagtaatctgtgatagcttgggaaagagtcaaaccaacaacattccggagaaattcgggctgaaatgccttaatatacccatttatcacctcattcacagcaagagattggggcgaaggcatttcagcgaccgaaacattctcaatatgcctgggacctgacataaaatatgaaacatcaatcaacatagcgatagttatttagaagtcttgcctttcccggttttcttttcatcttccacggaaacggctttatcatctgtaacagttacctccttggcatcttcctcttgcaaatcttttgaatcggcaaccggaagattcttttcatcagaaggcacctgtacttcaagttctgcaatgcgagctttcattgtttcacgctcttctgtcagttcaacaattgtcttatctttctctgcaatggatgcagtaagcctgccaatctcttcatttttctctgcaagcatacattccaatgtctttcgggcatcttcttctgtaacaagaccacattcggaaatagggatgagttgaatcatccctctattaatccgaatgcgttgctctttaagcacattggttacatccttatcgttacctctaagtatgtaatccataatcctacgctttagttattgcagtcttcaatgcggccaaatccccataagcgaaagcccacggcatataaatcgggaagataacttcttcttgtgccatcagcacaacctcattgcaaagcttggtctccacatcttcagcccattcaagtgtcaaagtggtataatcaaccaaatttgcggcttggttaaagtcacctaaaagatacttacctggaagaatgccaccatactcgataatcggacgaccggcaatatatttcaccccatcaaccattttaacgataccaagattacgtcctgtcgtatctttctctgattccataccgttaacagtcattggattaagaataatggcattcggaaaatactgggcatatgtcattgcggcgaaagctgttttcactacatcttcagagttgggttcctcaatgttcttaaagccggcttcatgaacactgaatgtcattttatccgtagccgtttcagcaccggagaacgcgacaccaggaataaggatacgaccatcttccattttcacaagagcgtgtgttttgttcagttcagtgagaacagcagcaccagcgaacgtgatactcattccatcaagaatcaaatcctgtggttctgcaaactctacaatcacatccttatcaccgttatatccggtaatagcttttacagcaccggcggcacctgtaacaatggctgtactgataatcttctctacagaagtcaccccagtattattaataataccaagcaaattctcaccattaccgtcaccaaacaagatgttccagtcttctgccatccaaacagcttcaggaagcatgttcaagatgtaggaacgaatgtacactcttgatttcaacatacgttttgaaatacggatatgagtaccaaggcgcttagttcctgtctgtatctcttttaccttgatacttgattccggtaaacgaccgttctcagttacaaaacgggcattacggttgaaagcatatacttgcgcataggcgagttgaggatatgcaggatcagctgtcagcgtcgttaatacatcacgcatatgcaactttttgttggcaacctgagtcacaacacgtttctgttgttgagtaatcaacaaatcaccggtgtagttgtcagtcatggaaacgacatctttcaaggagaagccgtcaaattctcctgatttgcgtgtttttccttctgcgaaatctctgaatttttcagaatcaagcatctcgttcaacttctcatcgaacttgttgatagtatccatagaaagacctttctgcttcattttctcgatactttcaccaagagttttaacttgttctacaagttgctcgttgtcctttaccaattgctggaacttttctccatcataggctttcaatagattattgatgtcaccaaactgtttcgttacctcctccggtgaagcaaatccttcaagtgacttgttaactacttcacacatcatgccggcgatattttccataaatgttttctgttctgccggcagaccgtccgttttcagattaaaatctgatactgtaaattttctaattggcataaaatttaaattttaagttatttattctcgaaacagctattcaaactcttgaaatcgagtaaagtgccattatcagcggctttaatcgttacttcatcgttcccattttccccgtcattcttttcttgagtgtcaacagacggctcattttttccggtggtatcttcagaagtgttttgcagaatagcattcgaacgatatacttttccccaacagtggggacatcttacataattcataaggtcttgtagacccttttgagtaaattctttcttttctgatttgacagaatcaataagagaaattacttgggttctaatctccggagtgagcttctccatttcttcccttacaatgtcctgtgttatccatctctgataatcagcagcataatctaatacctgttgggcaaaggtatgctctgtttctgcatcataatcaaattgataaccacaatgaggacatgagacaacggcaccaccgttgaggctcttcagtaataaacttaattccatatcgtatccttttaaacgttcatcactatatccatgctgcaagaacgctttccggacgaaatcaacagcttcctttacctggtcagcagtagcagacttgatattcacaaggaacgtctgtggattactcccccaacttgtcaatgttgaatattccatcatacgccattcaagcaccttacaaggatcgatagaatcccttttgatggcttttactccgatagagtgttcaagtgttctgccattctctgcaaacagtttataatcagctaacgtatcacggccaatctgtttttcaagatttaactgaccgaccatgaccaaattaccttctgtttccttaccattcaacggaacacctaacaacaggtctgtacgatgattcaggaaccaacgcatccgaccaatattttctttcaatgtcttattgaatgagccgggcatagatatgtcattttgtgagtccttcacaccgataccgttcaccgcaacggtaacgatacccttctcatcaacatcatttgcctttgtcttgtactgaaggcttttgattttctcttccatctttttcatctccacttttagtgttaaaaactcgatttactttatccagttcctcatctgacatatcaaatttcaatttgtcaaacaagggattttctatcatactttcgcctatttgggcacgccagtcattgagtgttataagcccacatgagaattgttcacgacaacgtttatttatatttgtctttacgtcctcggattctttcaatccttcctgcaaacaatcaacatcagagaaatcacaatccaaataatatccccctccttcaagaccaaggaaagctgtaaaatccttgcagaattgtttggccataggaataacagttgaacaatatacgctcttttcagcagtagcctgattgctaaatgtggactggtcttttcgcggaacaagaacggctgggatgccgtatgcccctgcaatatttattgcatcagccaaagtctcttcaaacggctgtaactctgcaatagaaagattagtacgaacaaagtcaatgtctgcatctgaaataccataaggtacctggcccttccttacaccatacttctcaaaattttgcttcaaaagctgttccttttcatcgtcagtcaacgctattgaaccggtagcatcagttttcttacttacaataaagcccaatccaccccgctttacataaatcacatttctagcttcatatacagctattagatttgacattggcttattttgggaagcaagacgacttttggacttcaagaacatagcccctgaatagaactctgcacttccgtctctatcatgccatatttggtatggaggaatttccaaactaccattccaaccatactccaaacgatagctacgaataatatcttctgtttgggcaatgccaaacaatggcatattcccgtaaacaggttctacaatagtcttatcagaaggtagcacccaataattatcgcaatatctccatttttcagctgtagaaaagacatcaggcatagcggcacgaataaagctattccctgtacacaatttataaatatggtgctgataaatcaattctttccaacgcatcaaacaattaggacgactaagtatgccattcattcgtttattcgcccatactatactgtcatccttagttttcttcaattgaaaattagcacctgcaattcgcgatgcaatataatcgatcgggaaaaagacttcaggtatcgtactgaatagcgttagatagttactgcccgctacaataggactagtaaggtcctcaatgtatgcaactgaccatttttcagccttgccactttgagtatctatatccttattttcagatgaagtaactatttcaacttcacctttagtcttagatttctttccaaatagattatcaaaaaaaatattcattgggttcctttttgagcaaaactaagtaaaaaggaaaaccgttttccaaaacactaaaatcttgaaattacgaaaacataactccaacgatataacacacttattttcaatcacatataacacaattcaattcaaacctaattttacaacgaactgtactagcccactcaaaacagcactagcctcttttgtttcactatctttattatagtccatcaggttattcatgaaggcaacatattccgtatcagattctacttttgatgcagaaaaaagaatactatttttcacataatcagatgttgcagcaatacgcttgtctacatccggaaactctttcattacacgaatctccttgtttgtactagaacggagttcccggataaaagggaaataagcatccgtacattcaattacacatgaatcagattcatgggacaaaatagaagaacgtatatcttctgttgaagtagtttccataaatacgacatcaacaacatgccatttatttccacatctaaacgcttgtataaggacaaatttcccattaacattcggcatcacatatagaatcttcttagtgtatttacattcggtatctggattgaagaaattaatagtgccattacaagcatacaagtttctttttcgccggttactaaactctatatactgctcactacacaaatccacaacgacatatcggaacgtatcagacaggtgcccgtgctcctcataagtctgcaaggtagttttattcttgaccttagttttaagaatggcaccgttagcatctttctgtacgctcatgtagtcctcaatagataccgaacatgattcgtcaatgtatatctctataccgggaacagtacaatcaaagatagcattgataaactcaccagtcattgcgacactcggattcttgttgcctaccttatcttcaatctcgaacccttctttctgcaatgtgtctatgaataagtccatccaggaacgcttctcatcgtcaatgctgtttgccgctttcgttgatgcatcaccatgtacatataacctatcagaatattggatagatttcagatactttgcaacaagtttggaggctttctttactgtattgtttgggctttcagcgcacgtttcatggaattgccaaaccttggtaccagttgtgaaatcgacctgccaatatgatacactgatatacggaagcacgttgttatcgacagagatatgaataggtaagtccggaacatacttatgttcaccggaatgtttgccacgattgaaggaaccgaagaactcactaccggtacgaatgacaccccattctcccaatgcgtacacattgtaatagtccggatcgtgaactctatcatactcaaagtcggcaacacattgctcatcatagaaaccatacgcaccgtcaggactaccgaccacccaaaaattattcaaataggtagattggataataactgtattaggtgcctgttcctcgatttgcttagtacgaagattaagtatttgcctgggtgcattcttctttacggatttgaccttggtaagttctttcggcaactctttgccggcaatggtaaccgtcatcggtacatcatgccatttatctttatcaataaactctttctttatccaatggctttcactaatcgggttgaaggtacaaataatctgctgccctttcttaccacgcaaacgcttacgtagctgcttgaaatccggatgctcgaactctgaccattcctctaactgaactcgcttatagttagagataccttttatcttctccggatcgtcaagaccggagaaatctatcttcgcaccatttaccagacatttaatagtattctgttgaaatttgaacaaatgggagatgccaagaccgatcgcagcgaccttataatcttcataaatggttttgagaatagaagctcctaccttacgcatgacaagagtgttctcaccatcctgtaatgtctgtatcagtattgtttgtgccacactatacgacttaccggaagatgaacctccatagagaatgataaaacggatagtctcatcattcaagtacttcaatagatagaatccgttaggatttagcttcttataatttataaccatattgttctaaaagtaaggtttctccgtaggatgaataccggattttgcagttcaaattgttctattcttccgaattctcattatcttcaaatccgatacgaagttcaccgactttatttccgtctccacctttgatgttgacattcttatcggcttcccatccattccaggcaccaagaatccgggcggcttctgtcttgccgttgaactcataattaaccactcctctattattctgaatcttcttcaacgcattacgggcacgctttggaagttgggacggacttctcatctttgttttcccggtaacagggtctacataatgtaaatcatcgggatcagcgagtacaatatccattaataccttttcgaccgttttcctctctacttcagtctctttcgccctctgttgcttaatctcacttatccttgcactaaccttgctattggctaacaatctgctagcagcactccaaatcgtttcaggtttcatctttgacgcatcataagacatcctatatgcttcactagcattaccttctgtatcaacgtagtatttacagaatttctcttgcttgaatgttaatggtttctcttgctttcccatatcaattgttatttattcctacgagaaaaagaagctgctctctatcctttaaaagctcataggtggcaagcagtgtgctgccagttgttaatatgtcatcatacactattattttcttttcctttatcggacgaagaagaaagaattccggattcaatctatctttagttaggcactggattgcattctcatagaatggtattttcaccgccccagctatttttgtgcagatagaggttgaaaaatgaaagccctcgttgtgtctccgtcgcggtgtggtgactatacaccatccttcatatccccctactatgaagcggtggagaaactcacacgctctctctgcaaagaatgatgcaagttcctccgactgtttaatttctgaaaagctggtaccagtcttggaacgagtgaactgggagatgtaatagatatcaccctttttatgaagtgacaccttttctctcaaatcacataaccgttcctgatgagaccagctcttacatttcaccgcttccggcttatcccagtcatcaatacgacatatctttccctttcttttcatcaaaaatcttctttactccatcctcgacagatgtataagacaaaggtactaaatagatatcccggttcaccgactgctctaaattgtcaaaatcccgtttttcattaattagctcaatttcaagcggtttgtagtattttactaaagaagcaaaatacatagtagtcacaggttggacgttacaaatattgataagctgccggttacagcccaccgcataaataagcccttcgacgacatcatctatgtaagtgaagcaccggatattctgaccacaattgtataaagacacgttttccttttctatcaggaaccagagaagagttctttttcgcggattaggtccatatacattatgcagccggcacccggtcgcagccttacaatagatagatgcatactgttcatcgaaatacttgcttattccatacatggaagtggtattctccggattcgccgttgacgaactagcgtatactaacttcacatgatactggttacatgcatcagctactcgcatgaaagtatcaatgttatccttcctgatctgttccaggtttccattaaacacactagtttgcgccgccaaatggaacacacaatcaatacccccatttttcaggagctcacatacttttgtggcttcagtaccagactttcgatcaagtcctatgacttcaacacctctttttgtcaattcgcggcaaagggcttttcctataaacccctcactgccggttacaatcattcttctcatcatcacaaaaaaataaaggatatatcaaactctcgtatatccaaattcaacatattgttagtaaaaaactcaaaaaaacattaacttcaaaatagaatacactacatttgtagctgtataaaatataaaatcaaataaaatgaaaagaccgcaaatagatataatcaaatacgcattaattgcaacagccatatttactctaatattaatattagtatatgtatatagatttcatcacggactgtcctataatcataatgattttgctgatttcggcagttatttaggttcaattacaggattacttgctttcattggagtactttatacaataaaagactcacaaataaatagacaaattgataatgaaaggtcaacattttataatttgttgggattatatcagcatcaagtcgacaccaacaaatatactgaacaccaaattgagaaaacaggaattgaagcattcaaagcatacgcacatgaagcgcgttcattattctatgcttatgtaatatatcattttataaaagatggagaaaaatttccatcagaattaacacaagtcagtaagttagacgagcaagcatttctggagatttatactaagtttggagttcattcaactacagaattaaatgtattattaaaaagtagggatcccaaatattattacgatactatatacgaaataaaaggcataataatgtcaagcaaaattcatgaaatgtatcgtataattgttgcatcaatctgtaataggatttgtatagaaaaaagataccaacagctctataagttcataagaaatgtcggagattatttatatgggcaatatggacaatatttagggcaataccatagaaacatatattatctgttggattcaatccaaaattttaaataccccaatgactattctaaaatatttagagcacaattatcctcagatgagttaacagtcatactattcaattcaatgagctcgcaatcaactctcaaaacaatttctttattaaagaaatttgatatattcaataacattattgccctcgaacttcctatatctggatatgatacagaaaaagaaatcgtaattcagactattaactctctttttcatgaatttatagctgattctacaaacaaatgattatatacccaattattatatttattgtaactgtacaagaatatagggaaaagagtggttgtattattcaacagtttcctctatacttccgcattcagaacgttcaatttctacttatttgataccaagataatcccaaaaagaaagtctaccttttacattctcaataggactttcaaaaagtattggattagctaatacccagttataaacttctttttcagcccagatggaagaatgattctgtacacaatccactatctcaatgctaccgataatggagcctgtacaaaaactaaaatctttccactctttgttttccggtaatgccaataactgctcattggtaagtattgaatcatagaaattatcgtaattcaaaggtttaccgcttgcatgaatcagtaccctctgccctaaatatttcttaggacacggccaagtacggttctcaatgtctttaataccgtggactatcaaagaggcccacggttgttttattgttattgctttcatttctattctttattcctccaatagttttagcagtgattttttatactcgtctatttccttaatagcatcttcttgacctgattttgcatcatttatcattaaatctgctactccctccattatttcatccttatgcctattcagatatttgataaagtattcctgcatcaaatcagtatccatatttgctatatccgaatatgtgtctccacttccataactgtcagaaaaagaagaataacaaagattacttatattcatactctgaatactctcccttctgccaaatccatctgtatgcttatctattccactattgctatggctttgaaactcttctctgattttagggagagtttctttaataaactttttcagttttctgccagtagtgattaacttacttaattcttttgctgtcatcatcagtctcctttctttttaatccgttctagtacatctctgttggcttccagtatttcatcgaaagagggaattggcatccagtgggtgactcccaaaagcccaacaagatgttctacttctgtattgattacaactaagaatcttctatcggaagtaactacgacaacctcatataaagattgtccatcgttggtgtcaggtaattgctcttttacacttatccaaggagattgctttttctgccactcaacgccagacgcaaatactttacgcatatatgtttcaatcacatgcggctgattgatgcgatttgctaattgagctaccaatgatttaaaattcatatctatcttgttttacgttaattcttcatctatctgttggataatttgccttaatgttgtacaatgatagtcggcacaccctgtttcttcattaacagcttcccaccatacgcacttatcgggatggtgatagccataaaagcgtatgtcataccctttgtacttatagtgcccggtacttacttttacaggtttatcttttttactcatatctatcttgttacgaattaagtttctcaataaatccatccagcaattcacaatgtcctccaacccagcgaacgcacaatttacactcgcatggctctgtatctttcggacgctggcaattctctttgaaagcctcgatagctttctgtttcatgtcttttctaccttcttcacgagcacctgactctgacaagcaaatgagttcgtcaagggttgaataatcccaattatcaccatccagtattctattatacaactggtcaaatctttcttcgtccatatttattcctttatatcttgatttgagcctaattaggctacatcgttaatactaatttctcctttcaaaactcgttctacctgcctgtcgattatctcttgaaactctatctgacagataagcgagcaatccggtataatctcttctactgggtcacctcgccatgttaggagttcgtcaaggaagattcgtccgtctttatcttttagacaagttgcacctacatcacgttcaatctgcgccacctcgttaaatacatccgggaagtcctttcgtatcttattccagtagcccattccgcctttcacgcaaccgatacaattgttgttattatagcccatcttgtacatagcggggatttcaataccggctttccaaagcattcccattgcatcctgcttcgtaatctgcttttcaataagcgggaatagtggctttgtgtccgggtactgctgttttaatcggatagcccggttaatctctttcgggtcataatcgaaaccccaaacttgaccgtcccagtgctgcaattctttttccaacttgtagcggactttctttttcagttcaagagtacaggcggcaccatgcgcgccgttgatatacccctttcgcaacacatcagacacacaggtgtacttgtcgcttcggataatgtggatagattgattgtaccacttttcacaatctgccaagaatctagtgttatcgggatgaccggaaccagtttcaatatagtagatatgcacatcatcgtataggcttaatgctatcttacaagcaactgcggatgtagcaccgcaactgaaccatgctattatcatttgattcctttctaattttattttaattatttttttgcaatatcattccaaaaagcaacgccttcaggagtattattaaaagggaatgaaatagttagaaaccaatgaaaacagcaatcaacatctaacaaattgttcatccgctcttcatttgtcattgagaagtcaggacactcaatattaaatgtctcatttgctctttctgtattatatttccattgattgaaaatacctagtctttctaattttgctattttttcattcctcttcatattgattgacttttagttctttacatctataaaggtaatcattattgacaagttttacaaacagaacattcgccaatttaacgccattttatgctgcaactgaccctagttcacgtaactttttactaatacattcacagagaacacgtgccatgttaacttcgactgcattccctatgaatttcttttggtcagcctgtgtaccaattaacacatagttttctggaaatcccatgatacgctttagttcaggtatgcgtagcattcgcattttaatatcaattatcccgtataagcccatgaactcttttattttttttgtcatagggctgtcggtatcataaatctcgattactacatgtccagtttcagttgcgatcaaataaggcggcattttatccatacgtgctatgagagtgaagcatggattatcaacggaaccacctgcactattaaattgagggttcattaggtagtgccactttctatttgcagtgactgtttgtgcgggctcttctatgctactaccaacgttggagaagtttgtattcataatccacggcttgcagctaacaagattgtacttaggattggcggtaatacatccaagcggcttttctgtagatgaaggtttgctgtttccatattgctggtctatgaaatatggagaaacgagagataaccgatccttcgttgttacggttgcagacggttcatttattgagcggttaaatccgttaccgtaatgggctgatacaaacgcatgatggtctttgcatgtaattgttccggctggttcattaatagaaacattcttgctttcggggtgtccactgaactgttttgaaagaaagcatacctgcgcaactcccagtctgttttgcgtagctactaccgggcatggttcgtcaatcccaggggcattatattttccagtccggctcatggaattatatttgataagaaaagcatctttgcccccggctacaaattttatcaggccggcatagatacgttccattgtcttttcagcaagtggcttctcacgaaaaatacttgttccttcatcggaaaaatccagtatctctttaaccgggcgccacttttccaaacgaccaaacatatcttgtttaccgtttttacagtgagtgggttgtggaaatactatcggtaatccatttttggcaaatataccaaagaagcgttttcgagtagtatatgcaccatagtcggcagcattgagaatacggaaatcaaagttgtagccatactttcttacgttgcgtacccatctttgatatagtctacctttatccatgctgataggctttccgttttcgtccatatcaccccaactcataaattcttcaacgttttcaatctgaatgtaatccgggcaaatagcttcaatgtaccggaaaagatgttcagcaagtgtgcgactatcagcgtcccgaggttgcccaccttttgctttggagaagttcgtacattccaggctcgcccaaagaacgaccgctgcacccggatattgagccttacatttggcaagatgttcaattagcggggaaagttccagcgtacgaatatcttccgtaaaatgcaatgcatccggatgattggccgcatggcttgcaatggcgttggcatcgtgattgacgcaggctattactttagcacactgtttaccatcaattcttgcagattccactcctgtcgaggttccacctgctccacaaaacaggtcaatatataataaatttatactactcatttcttttcttcaaatttctttgattattgatttcagacatacacatgcggcaccaagaagtcaataaatgatattccttaccttttctcactactatacgattgtagaaccggttcaagtagaagtaatttccgcagtgtgtacattttttcatctcacgtcctgaagcatctataatacgattgcgaggtttgcgatgaataagagtacagtttttacactcaccatcagttccacgatgccgccggcaatgtgataaggattttgccccacatttagcaaacaccctacaatctctacgaggtattgattgatacacattcatggcttcctcgcattcaagaatttatttactacacgagaaagtacatcctcattctctggcatcagccattctttcgcaacgttccaagcaatactcatagttggattgaagttatccttcctgacagtgtggtgagacaaacgcccttcagtgggtttcaaatccttatcatgtaagatacacagtccattttcgaagaaagcacaaaactctttgccggaaacaggttgaatcatcggaatagcaatattaataacccctaagaatataccagcagcccagtttgtcagtgctaacctgtcggcataaccagcatctataattcgttcaatatcatcaggagtacctaaacatggcgtatgacattgttgtttacaaacactgcatgagcattgtacaggtacacgacctgaagccctcattaccctttgtaatgaggtttcttttgataattctctcatagtaaattatttgagatactacagattattaaacatcgccccacagctttactgcaaggtcataattttttttagcctcttttactgctttattggcataagccatagcgtatgtatgctcgcgtcggtacttaccggacttcaatccttcgtgatattcttttgcttgttccaacttatgttcatagaaatctatactttccggcatggacaagtttatcgtattagcccttttttcccaatacttcgcaactctttcatgttcggcagccttatcgctaaactcaacgcttttccccatgttattccaggcatcatctatcattttgcgatgtcctcgttcgctatggtgtccaactttgataggctcacccaaagaaaggaaatcgcgatgtttatttgatttctgaaaatactcattacttttttgtactgccgatgacgcccattcatgcctgcgttccgctctttgcttagcccattcttgaacattaaagccgtcagctctaacaatggagtaatagtaaaacccatctttctcgaagattaggttaaatactatactttcgttctccttaccatacttggtggtaacctcaatagtttcacctttttcgtgcttctcatcacactttgccaaaaatacatttggcgcaaatttgtaatacgtgttcattgttttaattaaattggtttgacttatatgaaaaatgagaaaccacagctacttagccgtggtttcatcattaaataactttggttgactgggttgaaccaaatcatcgaataaaccaggaacacgaggttgtaacgccttgtattcttcctgaaagaattcttctttggttctcccatgttttttaccctttcgtgtatgtacatcgaaagtgtaatctggaataggaataggataacgcctgacatcatttatccacttttctatatcaatatcctttctatcatagatgaagttttgcaaatgatccgcatcacgattctttctacattcacaaaggagaataacagctttactgacaaatatcctccctttgggttcagtagcagtcttgtttaccagctcatgcccctgccacaatgcttctatctctttagtaatgattccatagcaatcttcagcactaatggtaaacagacgcttccacacatagtcgcggtacccactcgcccaaagttccaatgcaaaaaagccggctaccccggtgtcggctcgcctaatggctttctgcattgcagaactcacctcaaagaaatcatatccgcaaactgttcttataatcataattctaatttaatggtttgacttttagtttattacatcagtaaaattagctaaaaaaggcgaatatgacaaacagaatggacgccatttaaacgccttttttacagactattagaatttgaatttgcatgatatattatattgaacgagctgctttgttttgtctttcccattagtggttgcactctttagcaaaatactatcaccaaaattctttttgataaagaggatagatttacgttcctcttcctgattccttatagaagcaagcccaccagcgtttacaaaagtgttcttttgctcaaaattataccgcaaatcggttaaaaccttacgttctttgtacttcatgtaacaagaaatccaaaaatcttccttcaaacgtatttcctcattccaccaagtgtttttgttatagattactccataactgcaaccggttatcattttcgaaagagaaagaaaagcggattcatcatacattaccggcgatatccgagcggtgaagccaaacagatgtacatccatcatactggccatctcaaataatgactgaatgatattggttatcttatctttatcctttatccggctaggttctcctttttccacataaataggtttgcaggcatggacatcatcatcaagcatgaaaagttctccaaaatgctttgccatccagttacgtttcgggatgaggcccataacgtcgtcaggatgagtaacaatttcacattccgggttaaattgttgatataagtcagcttgactttcagcaacgcaaatgataggatcgttcaccaactttttagcgaacacccggtcatggcgcttatgacttggtattactattttgcaaggcatggcgaacgtcttttatgtcgattacattactcttacttactttcccggtcttgtacgacttcatgtgctgcatatccagcctttcacgaagccaattactatctacctcattacttgaggtgatgataaacaactcatgtttttcgtcatactttggaatgagaggataaatggctgtatcatccgtgatggcatcgaagcgctctttaaattcatcctctttcttctccggggcaaattcgatgccccaatcttggagttccgccttattccactcgttttccataacgtccaaatcattctcaccaaaattgacattatctttagtggcatattccctcaacttcttaacgggggtatcaggtgccagaattttacaaggcagttctttataacctaactccttgcaagctcgcaaacgtaaattaccacaaacaacaatatatctgccatcattgtagggaaaaactataagttctcgaagttcaagcatctctggcgaatcctgaatgcttttcttcatcgcttcaaagcggtaatcacgaaaaaaacgtggatttttcggcaatcccgtgagctgccccttattaaaatcaagtaggcagacttgaataatctctgtcataactaactatattaaaatcaacaacacaaaatcaacaacacaaacagtcagtaacaacacctaatcattttttctatcatcgaactctatcttatctttgataagctgttcaatgtcctcacaaccaaatctttttaaataggcaacaaggtaaattatcatctcggctgccaattcttcatcttccgaatatttaggaagattatcactcctatatttagaagcaatatcgaattttctccaaacggcttcaattcttatgctaaacgcttttcttgagctatgctcattcatcttaaagcgcttcctcatgatattcaagcatctctgggcaaacctattcaatgttatcatatcgatcgggttaaattgttagactaagaataatctcacactatttaataaaggcggtggtctgtttttatacaaatacatatccattcttatttagattaaatagcttccatcaaatcaaatagcgtcggtgcattcacttcaatttcagcttcatgcaagtatgaaaggctgtctttccaatagtcataattcaactcggtagagagccctttacgccccaatctaatagcacagtaaggaacagtaccgataccgccaaatgggtcgaataccaagtctcctttatttgaataccgttcaatcaacctctcaacaatatcaagctgaagaggacaaatatgattttgacgttttttctgtgactgcttggtattgagtgtacgcatccgggtaacgtcatcccaaatccaaggtttcttacttacaggatctacggccataaatgtttttggtagtttaccgtaaacttctaattcttcagcgaaagcaacatgttcttcataattgtatatatgttcacgctcatagtttctaaacaaatggcgtatcttgtcaataccggcaactttcatatcttcatagcttaacaaagtattacctgaagatttccaacttgcatgagcatctatttgccagcgggctaacgaatattcattcttattcttggttactggcaaatctgcataggcacgtgaagtatcagaaggcagtttacggaaaagaagcacatattcagggcaaccaatacccatcttagaaccatctttgcacatctctgtatagccaaggcggtaggtctggttattctcccttaccacatcggtatctactgtgatacgccccatgtagcggaatccgtgtttcatgtagtgaaataccgtcatttcggagaacgggtcgatggtgggcataccgtcacctgtggcattaccgaacaatacacggtctttcacatggatgcaagccagccgcccaggcttcaatatccgcatcagttctggtgtgaggtagtccatctgctcgaagaacttgtcgttgctttcattatgcccgaaatcgttataggtcggcgtatattcgtaatgattggaaaaagggatgctggttacaaccaaatccaccgagttgctttccattttctgacactccaaaacattgtcgttattgatggctttccacagtttaccggatttttcttcacggctggcaaacatccagcgcatcatcttctcctctgcctgcaaaccgaacagaccgttctcacggacgatatcagtcattttagaaaccatttcacgatgctgcgcccatttctgcataaagcttttgaatatctctccttcactttctgcatagaccaagtaaaggtctacaggatgtttttgcatgaaacggtagatacgggctatcgcctgaaacttgtcattgaaccggtagtcgatgaacatgatagccttatgacaatggtactggaagttcaaaccctcaccaagcatttcaggctttgcggccaggtatttcaatctcccgtttttgaagtccgctatcaccttgtcggcttcctcatcatcctgcgagccataaacagctttgcaaccggggatagccttgcaaagggcttcccgctcactctcaaggtcatgccacaaaaggaaatgctcgtccttgttttcaggacgattaataatctctacgacacgggcaatcttctctgccatattgtcccgacgttctttcgctgcatcagcaagtccgagagcagcctcacgaaacatcttcacttgtccgtcacggtctgtaccggcagtggaattgtcaacgctaaccacttcttcatgtacccgcagttccggcaattcatagccggtatcaggataaccgaggtcggaaggcttggttaggaacaatgcccaagttgatacccacagccaaaattctttttctttgtgtggataaagcgttagattattagctttggtactatcacgttgaaaaaaacgtgtaagggcttgacctgtatccatcactccaagatatccggcataatgtatcagctccttgtatctgttaggtgacggcgtggcagtggcaacaaagcggaaaggcacatcggcgaacagcggtaggaactcttggtatgtcttggtgccgaaccctctcaatacgcttgcttcatccaatgaggtaacggtaaaaaaggaaggttctattcttacgccgtcttctccgtcacggacacgctcatagttggtaatcattatatcacacttgcaggctctgacttcgctcatggtcttgacatacttaactgtcatgttcatgtgctccttagcttgggtgataaactctactactacacgtttaggacaaacgataagagctttaccaaaatactggttgattataactctgcatatctccaattgggttactgttttctgcataccgaaactggagaatatggcacggcaaccaccggataccgcccaacgaacggtatctctcacatgagggtaaagagaagttgatatttcattaggattaacttcaaatccagtattatggctaatagccatcttgtcttttagaaattctatatagtctttcattttcatttcaaataaagagaggaaaccgttaggcttcctctgtgttatcgttattaagttcttcgagttgctgtttgagcttcatctctttcttgctatatgaatctgcaagtttctttgttagcgcattgtaatcatccggatattgttctgcaaaaaggattttctgacacttttgcaaataggagcagaaattcacattattcgatgataagcattcagcaataaaggctctataccattggtgtcggtcagcttggttgttcttgacataatttacaaaatcactctcaccattccattttttcaaattcagtttttcaagataagtactgctacaaccgctaagaaccagcacatcaaaaacaagttgttcattttcagagaattcttttgttctctgataatatgttttctcttgcgcccacttgcgcatttcttcagcagacttctccttgactatatccttcgctctttttaattgggcgtttattttttccctttctatctcttttagatcggcaacggcggaagtagaggaagccgttgcttttctaacataatagaaactaacgttaaattcgggagaataatgtccaaaaaatgaaagacaacgataaacttctccatcttcaagcattttcaaagtgcgttcatcatcttctgaataccagcacttacatctaaagatttcatcaggatcaactatttcaaatccaagttgtttaacagcttccaaagttttttcatagaaaacctttctatcttctccccaatatgtatcgggacgtctagcgataattactgtttttccaaatgaaagaggttcgccaactttaacaagatgttcatattctagttgaattttccgcgtcacataagcaatctgttttttctcatagcaagcagcattgatacatctagcatccttactattcatttcatagaacaaacaaccatgattacacgtattattctcacattgagaacatgatttaatatcggtattttcccaattatcggaatcatctttaatccaaggtgcgttaccaagctccatgaaagaattactcacaaattctcgaatcatagcagtagtacattgttcttcctcctcctcatgaaactctttttgagtatcttcatccaatttagaaagaatcatagcaccggacaatggtatatctccatttcttacccgctcttttagttcaggaataagagaattcaatttaatacggtcaaaaacaaaccgggtagactttcctattttaagagcgatatcttccaaagttcgtcctttttcagccaactgcgcaaaggcaaaagcttcttcgatgggatcaacatcttttctttgaagattctcggtaatcatcgcttcaaaagcctcatcatctgtcatttctctggcaatgcaggatattgtctgaaatttttccgacttttttcgatgggctttgatttttgcaacattcgcttcatcttcctttgctttcaaaagtgacacagcccggaaacgacgctcaccgcaaacaatttcgtatgtgtaaggtaatggggtaacatctccggtttctaggttagtcatctcctcggatttagcaactctgacagtgataggttgcaataaaccttgcttttcaatgttgcttgcaagctcttcaagagctgcttcatcaaaagtctttctcggattcaaaggagaaggactgataaggtcaattctaatgttttgtacttccataatttaattatattggtttgacttttaattcattacatcagtaaagttatcgtaaaatgacaagttatgcaaacagaaacttcgccattttaacgccattttcatgcgggcttattacgtatttgaatgaagccacgtttttccgtttcccgaagcaattccatatcttcctcacggatataacaatccgtttcaccattaacagttgtgtgattaggaataccaaaacgctcccgtattcttcttttcacttcaggaatatcttcaagtttgatatgcctagtgttccagtaaattgtcaccttctgcttcttgtttgccattttctcttttgtttagataagagattatttcatttgagagacttaacgctttagcagcttcttcatctccttgcccaactctaagtttgagttcgttccggtattcttcatacgacaagccacttgtaaaattcgtttcccctgacaatttagccttatgagtattccatgactgattatcagcaacagcacaacgttctttgttgtattcacgaagccatcccataatgatagaaccatcaatacgattgtaattttcaccgtatttcattttcattgcattcttgaaacacagtttaaaatcatcagttttcatatatggatattcttcaatgattaaatctactgtagtagcgacttgggtagccgacattggattaccgacattgaaaaactccaaagcatcagctatcaatatgaccagcactgctctggcttgcggttcaccaaactttcttatgatagtgccaatagaaggttcatcactttgaaatacatcttcaaccttctttgggcatagagctttgcaatagttcttcggcgaggtctgtaagactgctaaccgattctcttcttgcggccgcagtatcagttcgttttccattgtaatttccttctaaaattttagtaaaattcccagacttgaatatccagtcgaaatcacaccgccaattccgatcattttctccaagtaaaaaaggactatccaacactttttggaatacatcgaatatagcttgtttgttgtattgagcaacacgtgctttaatagctttctttcgttttgcatctacggactttatagcaggaagcttacctttaaacgtagaattaaaataatccattagcccaacccaatcaatcttttcctcgggaaacaaagaaagctcgtctttctttgattctcctttaggagaagtttctttcttttttgaatgagaatcattatcatctacattatcatctacataatcattatcatattcattatcattatcgggttctttgggttcttttgggtttccaaataacccagtgggttttgtgggttctttgggttcttttgggttttcacttttcggacgtccccccttagaaccattgctcttattcctttccacaatagacatatacttttcagtatccctgtctatatctatctttataaagttaaaagcaatatttgccataggtttcaacccccgaagatttcccgttgtcgcatactcaattatgctttcgtaaatctccagcctgacatcatccggtaaatccttgattgcttctctccaccctttataaaagatgaatgaatttctttccatattttaagggattatactccgattagtaataaaactcacagaccttttgcttccttcagttttttcgcttcttccttgtaatgagtaatcagcttttctaattgaaagtcactaaattgcttagtaacatttttcttggcttccaggagcagcacatttcgttcaccatacttggcaactagacgtctgcgataatcctgaatatttccttccatgaagcggttacaatgtgaacattgagcattgcagttcatttcatcaaagcgagtactcatgtgttggcggttgatgtaatgaccgcaatctgctttattgaaaggctttattttaccacatgaaatacactgaaaatatccattaggcatcgtatcacgataacggatgaataaactaaatattctgtctagttcattgacaagatcaggtttcttcttgaccttaacaccttctacctcgaaaagaggctttttcttttctttcttcttgtaatttctccacatgataattaaaatactacattggttaattgacggccacgactcattatacaccattttcccttttcaggctgttctatgcgtaactcttcaacacgcccaaagcgccggaaattcccactcaaatcaacaacccaaccctctttaccttggcagggacgaatgacacgaccgaccatttgataatagagggaaagggatttggttggacgggcaagaacaatcgtatcaagttccgggtaatcgaatccggttgtaagtactccgacattagcaacaacttttattcttccatctttaaaacctttcagaattcgtgccctttcttcctttgaagtagaaccgctaacgatcgcacaattaggaatttcagaagccagtttttcagcttcacgaataaacctcgtgaatattaaaatacctttgcgtggtatgcccgatttggggttcaacagacgtcttgtccatccaactatatctttgtatatgtccacacgttcaaactctttcagaagacttttctcatcgtaatctgcaccagtagaattagttctgactctacttaaatccaactttgtaatatcatagtatttcaagtttgcgagaaatcctttagcaagcagttcactcacctgacagtggtaaataacatcagtgaaaacctttggccgggtacgagttataaatttaagcatagcaccacctcttcctgaacatagtctgtaaggagtcgctgtcagcccaataactttcctttgctcatcttcaaagaattccttatacattcctttctctggattcactaaatgacattcatcaatcagaacgtgcttgaaatgtttgaagaaactcatgtgtttcatcacactaccaatcatagcgaacgtaatacgattgatatcctttcttccggcagaagctgaataaactccacaatcgaatatgccgtatgattgaagtttcgcaaaattttgttcgagtatttccttgctaggctggaacactatcagcggcccgtctatccgtgcagctatattggcaatgacaagggacttcccggcaccagtgggaagaactatcacgtagtttttcttttccttggatttaaaaacgctgaccgctgcatcactagcacttttttggtagtctcttaactggtatgtcataatttgatgtgatatttatgaactttcgaatgacagtcaccacaaagggtaacgagacaatcaagatgttcaagttcatgaccaacgattgattttccgttaaccctgtatgttttgtggtgaatctctaaattgaagtctttaccgcacatctggcatttatgtccgtccctaatacgaactttacgcttggcttcttcccaatctggattattcacaagccgcttcacatagttggacttcctgccttttttgtgctgcaatctactcatcgtcttccggttcttcttcaggaagtttatcagacaggtcttcttcgaacttgtccccataatcttctgtatcatcaataggacgttctacttcaggatattcaataccaaacaaatcaaacatcgcttttctgtttcgatcttcctgtgcccaaagagaacgtttgtcccaatcaggaattttttcagctttcacaagcttaaactcaccgttcacccatgaataatacaggaaatatccatcaagagcaaaccggatcgtattcttacttgaaagatgatactccctcgtcccctttttgacctcggcagccaagtctttaatttcagtcttaatagaagctaacctgtcttgtgcatcactcttaattttctttgcacgttcaatggcttccaacagttcacgttcgcgtttggggacctcattctcttgcttgatgcaatactcttcacgaatttcggaaatctcaaattcatccagtaaacgttgtgtcacctcactttcagggaatgtagcattgaaatgctcattcaccaactttatcaattcatctacattcgtagaaccctgaaataaaacagggggaaatttttcccgaatagaatcgggaactacaaactcgattgtctcgggttcgtagtttctcaaatttgcaatcataaattataaaaggattaattagtaccggttttggtactcatgaataaaatctaagtaatgctggtcttcaggcaatggaagtgtaataccaaactcggtggccgcatctattttcacgctttccatgaaattatgcatctctaaagtattaagtttacttgttcctcgcacaatagtttccaccttaccattcacatgaacctgtttcacaagaaacttcttacaatacaagtcatgtatatcctgaactccagcagcagtgctccaatactcttcacctgtgtattcacgcaaacaggcaccaatacactgaaaccatttccacatgagagcattttgatttaatgttctcggctgtgtttttttcttaatggttacagtgtattctccattacgaagtgtgctgcacatgaactcgaaagacttatccatttggattttgccatctttcttcgtcaatgttgcttccataacctatcagaatggcaaatcgtccttggtcggtggtggcggtggcgggcactcattcaccgcacttcgagtctgattattggtgtgttctggaagaggtggcggtggtggcgcttgttgaggcttaacagaaagcatctccatattatcaacaaaaagttctgtaatataccgtttaattcctctgctatcatcataactccgagttcttatctttccttccagatacaacttgtctcccttatggacatacttctcaacaacatcggcaagaccacgccaaacaacaatattatgccattcagttctttcaggaacctgtgttccattgggaagggtataacctttttcagtggtggcaaaggagaaagtggccactttagaaccagcttccaaaattctaatatcggggtctttgccaacatgcccgataagcatcaatttgtttaaactcatgatttatcctcccttattgttacacggatactatcagctttaggaactgttttgatatacttagaatataattccggatagtcagcctgaaactttttagtatcaaaattgtcactcgtagaagcgggtgtataactaactcgcaatcttccggcatcccatgacttgacaccattctcacgcatagcagttttcaattttgccttataatctttctgaatcttggttagatctgcaagttcttcctcaatcccgattatagtatttacaagctgcattggaataagtaacttgtcatcatcaggggcaggaacaggaagattggatagatattgctcacccttcttctcgcattccattaatttcttgacttctttatcaggcttacgaggaatttcaaccaattcatgtttatcaccacgtacccaaatgccgaacaatttatcaactttgagtaatggattttgtagttcaaacagataagcataaattgacaactgccaactcaaatactcttcgtcaagatgcagcgtagttttgatgtcaccaagacagattctaccggctttctcccaaacacaatctatattcgatgcaaagtattcgttatcagagacggtgtactcattagcaaaagccttatatccagcttttgttcgctctttcaaataattctctgcttcaatactttcaggcggtaagcctgttgcatcaacaaactggcattgagcatgaataaggctccccttctcagcagctctcttcaacacaaaatctgggacatctttatatttgtcagggaacaactgccggctaatcataccggttataccttgcaactgtttttcaccaagcatataagtgtggttttcctcattgaaaaccacactggatttcactaattctatcattattatcaatttttaggaggatatgttttctgcatgtcaatagttatgtttctgaactccttattattatgaagttcaggatgttcagcccaaactctctcaagctcttcgcggcttttaacaccggtcatttgtttaatagcacgatccaggtctacaccagtatatactttgcccgaagcgtttgaagcagaaacattgggagcatatactttttcctttgtattaccataagcaaaacgaacacggtttttattgtccacaataacaagtagaataatctccttttgctcgttataaccaatctcttttacactgaatttggtgtatagagcaggagaacctgttttgctctgatatacttcatttttctcaagtggaatccaaatgaaaggacccgtataaagttcacgcccaattccccagttaaatcctgcacgtttaaaggcatccgaagcctgccctttctctttttctgtactggattctgtcccaacatcctgtttactcacccattccttcttttcattatcccaaatggacaacgtacagaatagattcccattaacgacatcatggtgccgtttccagttcatttctccgaacacttcatcaagtattctcatgtctactcgagcatccttgtataatagcaaggagcagcccgaaccgtccggtttcatagtaccaactctacattcaatttcagaagctagaagcggtctgatagagtttttcttcttctcttcattctgaaccgttgatacagtgttttttctcgctgtcataattctaatttaatggtttgacttttagtttattacatcagtaaaggtaatcgttatttacaagttatgcaaacagaaacttcgccattttaacgccattttcaggtagttaaaaactgcctgtacagtattgtacaggcagaaaaataagaaaatgaataatccaatgtaccttatggaacggctacgcttgaagggtgtacggctccctgatttatacataatgtaaatgctagtggacggaaccggagtcgaaccggtctcacggaatattggtgcacctcaccgcagtttcaaccaacgatatacatatccgcccgattaattaaaaaggtgcactatcttcacagaccgtacaccccaatcacaaacacaaaacaaaactcatgaactactataatttaataggatcaaaagggtgaatggcgtggggctcgaacccacatcacgcatatctgcgtatgctgccaattacaccagccatccgtttcaagtgaactattctcacgaaccattcacctagaacacaaacacaaaataaaacacgacattaactattaattaaatagcactctcacgagcttcttgcttccggatagccgttcaaagcacaccggaatagtatagaacaattaaaactcaaataacaggggctttaaccctacagcgtccttttcgctggcaacattagttaaacataaaaagaaaaattctctgtgaaggaacccggactcgaaccgggatgatagattacctatgtatgactttcttcaatctatctgcatacttgcgtttaccaattccgccattccttcaggtcgtagccagacgcttccggctacattgattgtatatataatgcaaatatattttcaccctcacgggttacttaactctgattgagttgagccgggaaacggattcgaaccgctgacctcatgtggaaacatgcgctctaaccaactgggctatcccggcagatgcccggagaaccgggctaattggcaaatactaaaattaagcaatgttgaccttcacaggctatttttattttgtttcttatcttcatagataaatctagtaaccaatagtacaacgactacgaagaatatgatatatgaccaagcgatatcacttcttgtagcttcgattcccccacctatatacatagctaccaataaggcaaccactgtaaaaatgttatgaacgattttcaatgttttcatttcttccgttttttacgtttgactttcttagcgcatcggcaatgaagtaatacctgagcagcattacagtgccatttaccattttgagcatttacaggcttatcactttcaatcttacccgcttctataagattcatcaatttcttttccccacctacataatatgcagacttatcttttccgaatgtctctgtagaaaacagacggagaatattatctagcaatatttcagccatttcacctctaatcatctcaacaaacaaggtagttacgcaattctagttactataaactgcatattttttacgtctgactttgttttccaaaccattccttcagctttttctttataaagccgagcatttaaagtgtaagtaacagacgttttttgaatgataggaaatacttctattgcaccaacgtccatgtttcgcaaaacattgattatactgcgtctttctatttctttttccatactgattaattttaaaataaaagctcccccgaaccaattcgatcggcagcatcacgctttattcggaggatttacttaactttggggtgtaaaatcaaaaattaagtgaagaaattcattcattatctctctttttatctcgattaaacccgactttacaatctgcataatccccaaaagctttctgtatcatagcaggaagcttttcggctactattttagctgattttatcggcatattctctacatgcaatgagaatgtggcatcttccaaattctcattcctatcgtttttaattgttacttgaatcatgtgattattaattagttaataattttcccgttccaagattattcgctaataaaaaaggaacgggggattttcttatttttgaagtgtcaaatcaaaaaacaagaaaaatatgaataatgaagaaaaagtagtttcatactacaaagaaactttagagaaaaaaatcgaatggactttcagactccaaagcactctgttgactgttgcatctgctacttttgctgtacttgtttctttaagcaatctttcaaccaacaacgcttgcagtcgaattttactattggtggtaatatgttcaaacgcactatccatccttttttcgtgtataaccatatacgagaatcgagcaatgagcaacgtgatgatacgcaacgctcaaaaacgggtagaagaatatatcctctatagcttatacaattccaaaatgaccgtaacgccagccgtaccacgcaataaaatcttcgcaatttgtgagtcaatttcctacatttcatttctattctttattattagtttaacagcctatgcaatttataagatatacacgcagttgtaacgtcaattaaacactgaagtgatgaacggattcgaaccgccgacctcatgtagaaacatgcgctctaaccaactaagctacatcacctttatatacataaagcaaatacctcgatttgccgacaaacgtctaactgatttagttttacaacgatacggcttgaccattaaccacagcattatatcgttgagaagcccgcctacgtcagtaatccctttcggcatgtgtcggcttccaaaacaccattttaccaatatgtcaaagaactcttctctgttgttcccagtctcccttcaagggcaggctcaaagaccggactgggtaccggataaccggcggtttggtttgactttagtgagggttagagaatactttggttgttcttcaaaactatgtccattaagtttcgttgcgattcaataaatttcttcaaatcatcacattgggaaactttctctctataaaatccacgttctgattctaaatctcgtttgagtttttcattctcacctctcaaagagctgatcaacgcgtctcgttcttcaatcacagcttcatatttgtctcgctgtatttctagttcggttcttttatccattgttgtataatttgattaatctccaacgtaatgtgcaccgtaatgagtactatttgagttgtagtaagcagaagcgggaatactgaggttattgtatccctcatgtcttgtagctttagccgctttgttcattacctcgtttctttctgataagaatttatccgttcttgctttcatggcttcctgtgagaaattttcttgaagtttagcaagtctccaagtagctttcagaacctctccaaaagtttttccctgcttcttgcctgaatacttataggttctatgagcatttctcattatttcggataaatcaaatcgtttcatgtctgtcacatttatagagtttcacatttgttttatcaatcaatttttgtatgtttgtatgattgattgatttatgatgcaaatatattgctatttgacgatattgcaaatcgaaataacatttttatatcgccatatgacaatatttaactttttaagcaagcttatggatacgttaatagaccgaattaaaatgattattgaagcaaaaggatattccccaagagcctttgcgatagcaataggattcaattattcaactctgaataattatttaacaggaagaagaagcacaatagattcagaactcatcgagaaagcactcacgtcatttgacgacatttccgcagagtggttattacgaggcaaaggtgacatactcattcaaaaagaagaaacagaaccaggaatggacaaattgaaaagtattgtatataccatagccaatctacaagatgagattaacgaaaaaacagtgcttacccaacggcttttggaagaaaaccaaaaattaaagggtgaactggctatgttgaaaaatgaacgaaatgtaggataaacttatatacgtatgaaaaaaagatttttaatactatccttcttatttgtgcttatatttaattcatgctctgatgacagtattaatttagcaggaacaacatggacttctgcaaaagactggtacggaaaaactcgattgtcttttgaagaaggcactccttatttaagatctttttttgctatatcttttgacttgaaatctttcacaatatataatgttgcagatgataatgaggatttagaatatgaatggaaagaaacggtatcaggtaaatactctataaacgacaatattgtgaatctaatagtagaaaaagacaatttaacaattccctgcgaaatagaaaaagatataatgtattacagtaatactagaatgaaactatataaacaatagaataaatattttttcaaatatgcgcccaattaaaactgtacccccaaaagatgaaagagaatatcctttagttataacagctgaagaaaaggataaagtattaaattatattttggttgtagcaaacgggaaaagaacagctaaactaaattataaagatataccagaccttaggatcagtaaagaacaatatgaaatagttttagaggagttcaaaaataggagatttattgactataaaggatatggtattgaatatcttacgttgaattttgaaatattcaattttgcagaaaaagggggattcactgttgaaagagacttatatatattaagttttgatacatttcaaatgcagctagaacgattagaaaaggagttaagccctgatacagcagcgaaagttgatgatgttgtcggaaaagccaaaaatataactgaactactgatagggctctctgctctagctgaaaaaatgaatctctaagatttattatcaggatcagttaataggaactccaatatagaagctgcacgaagcagtcttgaagcatatagagttgcatctgcatccgggttgtattgataacgcctagtctgaaactttttaaaagtaacaaagccactagacatatcattagcaagtgttttcaagcttgatatagtttcttttacattttggtcataagacatttttatacgcatacgagcggaatcatccacttttgcacaacactggggataaaaggctgttgcattatcttctttagaagattgttttttacttatccttcttaggacattttttaataacgatttcataaacgcactattttagtttgacaatgcgcaaatataatatttaaagtaatataaaatatgaaatatagaaatcttgatagtacataaaacatcaaatggtcgaattatggtcgaaccataaaaaaaagcaggactatataattgatatacagaatatacaactagatttccaaaaatgtgtctagtttagtttttgtgttgaaatggcttcctcgtcggcggacgaacaaggaagccattttatgtatatatactaactatttatatatcgtttcgaacttcttttaaatagtaatccaccccttttattccactttttctttgttatcagtacttgattgattaatactattatctatatattttttcaacttaaacaaaaagactagagatgttattgaaatcattatggctgctccacaaacgatattctcaataggatcacccagcttttcaataacatatttaattatatagctcataacagcagatcctataattatacagctgaaagagatttcttagatattaaaggtctcatatgatttgaatttaattattaaaatatctccatactagttctaacccctttacgacggatttacaattatacacatttaatcccttaattcaaaaaaatatttccactacattaaatattaatcaatattatactaaatgttcagtatttgaatatacttgttttttatttattgtccttaatttagcggaatacaaatatatttgcagaaaatattcattattttccctaactttgcagtgataaatctcaccaaaatggaattcgacgtagaagaactaaaaaaagcactaatagagaagtgcgagagtgaaggtatactgtatgcaatggttgcgatagaccgacgtacgaaagaagttattcttcccgatacactacaaggagctttgaaacatccggaataccttgtgtgtacttgtaagaaggtggaagacaaatatatagtggaggagatcacgaaaacgtaactctcctccagtcttttatgttttactcagcaagtagtccgctaagcaaatcgttgttcttgcagataaggattcatgttacctgttgttttagtagctctgttttgaattaatgtatctctttactcgcatccccaatatacgatgcagcccctttatctataaacagttctacattctgtgcatgatgagcgatataagccgcaggacccgtatctcccgaattacagatttcctccaccacatccgccttattctttccggtaatcagaaaaataacatgacgggcattcagaataggatatccggtcattgcaatacgcttctgcccgttgcagggatgaatactgactacataactggaagtggaagtcaagagattctcctgtcctggaaaaatagaggaagtatgcccgtcgtctcccgctccaagcagcacaatgtcaaactcaggccagcccaatctgtatggcagttgctgtttcaccaattcggagtaacgaaccgcctctttcaccggcttagcttcgccacggatgcggaatacgttttcataaggaatgggggctatcccaagaaggagattacgcatcattccataattactgtcagagtcttcgggaggcacacaacgttcgtccacccaatagattttcatacggttccaaggagtgatatccagatattcattcgcccataaatcgaacatcaaagcgggggtattacctccactgactgcgatgttgaatattctgtccggctcctcattcatgagttccaccagacgaagtatcaacgcgcgtgaggtttcaatcgacgagggaaaaactgctaatttcataattcacaatattgatctgtgttcgtcaaattcttacaaggattcgtccagtcggccccatgctcgtgcatcattgcttcactttctagaggtccccacgtgcctgccggatagccgtacaaaggtgcgtcagggttttctttccaatagcggagaaccgggtcaaagaatttccatgaggcttctactgcatcgctgcgagtaaataaggtcggatcgccctgaatacagtcgtctatcaggcgtgcgtaagcgtcgccactcggcactccgcctaactgtgcataactgaaatccattgtcacctgacggacttcgaaacctgcaccgggcactttcattccaatcttaagcactattccttcgttgggttgcaaacgaagaatcaatttattagctcgcggacagttaccgccggagcagcgaaacatctgatgaggtgtttcacggaaatgaacgacgatttccgtcaccttcgtcggcatttgcttgccggtacgaatgtagaacgggacaccgctccaacgccagttactgatacccagcttcatggctatgtaagtttccgtacgtgattcggaagctactcccttttcttcacgataacctttcttgttaccggaagccgtatattgtccacgaacgatgtgctcgttcaaatcttcttcagtaagcggcgtgagagactcgtagactttcaccacttcattccggaaattgtccgcattaaagacagcaggtggttccatagctgtaagagctacaagctggataagatgattctgtaccatgtcgcgcaaggcacccgccgtttcgtagaacccgccgcgttgctcgataccgaggttctcgacggctgtaatttctacgtagtcgatatagttacgattccagagaggttcgaagacaccgttggcaaaacggaacgcaagcacgttttgtgcagtttccttgccaagaaaatggtcgatacggtaaatctggtgttcgttgaagacagaagcatagatacggttcaactcacgtgccgattcgagatcgtaaccgaaaggtttctcgacgatgatacgtgaatgaggagtatttagtccggcagccttcagatgcagaggaactacaccgtaaagcgaaggcggagtggcaaggtaaaacaacaaattatccggatctacctcgttagttaattccacgagacgttcgcggagtaaggggtaaccttcttcctttgcagggtccagcggcaagtaatacaggtgagagacaaaagaagacataagaacagtatcctgttcgtctgccttgacgaattgttgcagttcttccaatatataagaacgatagttctcgtcggagtatatcgtacgcccgatgccgagtatagagaaatctcctgtaagccgcttgtcgcggtataaggagtagagtgcaggcatcagtttacgcttggtcaggtcacccgacgcaccgaaaataatcattgcaaatttatccattgtcgcttttttatttctacttatcaaacaatcttgttacttgaaaatacctatttattatacattatatgttccagatttcgtatcgcctccgtgtcctgtccagttttcatggaagaactgtccgcgcaactcatcttttcgttcgaatgtatgcgcgccgaagtagtcgcgctgcgcttgcacaaggttagcgggcaaatcggcagaagtgagtgaatagaaataattcaaagcagaagaaaaagccggaacgggcagttcttctttcatcgcttctgcaacgagactcttccaaccggaaagcaacgtcttgatttcttcccggaaataaggagccagcaacaagtgcttaggtttatcgggtgcttcgaaagcggcagcaatatcgttgaggaatacactacgaatgatacatccgccacgccacatacgagcaatggaggccagatcaagatgccagtcgaaagcatcggaagcacgttgcaacacggcgaatccctgtgcataagagactagtttagaagcataaagggcggaaaagatattctttacaagttccgccttattatatataggttgtgtatgttgacactggaattgtttggaagccagacgacgcaggtctttttgtgcggaaaggctgcgttcgaatactgccgtggcaatcagccccaacggcatacctagttccatagcattaataaccgaccatttaccggttcctttctgtcctgctgcatccagaatcttatcaataagatatcccccggttttgtctttatgacggagaatgttggcagtgatttcaatcagatagctgcgcagctttccttcattccaacgggcgaacacatccgccatttcttcattattcaaatcaatcagattcttcatcacccaataagcttcggcaatcaactgcatatcaccgtactcaataccattgtgaatcatcttcacaaaatgtcccgaaccggcagggcctacccattggcaacacggtgtaccatccggtgcttttgctgcaatactctgaagaatcggcttcacttccgaccatgctttttccgaaccaccgggcatgatagacgcaccgttcaacgctccttcttcccctccggacacaccactaccgacgaaaagaaaacctttcgattcggccagtttgacacgccggttggtatcttcataattggagttaccaccgtcgataagaatatctccgggcgaaagcaacggaaaaagttgttccatcaattcgtctaccggacttccggcacgaaccatcatcattattttacgaggggtagctatcgaatcaacgaatgcttttatatctgtgaatccttcaatatttttaccttttgcacggctattcataaagcggtctacgactccttcttccactccgggaacagtacggttgtaaactgatacataccagcctttactctccatatttaatgctaaattctcgcccattacagccaagccgattagcccgatatctgttttattctgatttgtcataacttgtatattttgatataatgtttatcatagtaacacttgaaaagaacatttgttcgcaatatttagattaaaacattatttttgtggtctacaaataaaaacaaggatgaagaagattaaaatcggcttattgccgcgtatcattatcgctatcatactaggtattgctatcggtacagttttcccggcaccactggtacggatatttgttacattcaacggtattttcagtgagtttctcaacttttccattccactgattatcgtcggactggtcactgtggctattgccgacattggtaaaggtgcgggaaagatgttgcttgtcaccgcactcattgcatacggtgctacgttgttttcaggttttctctcctatttcacaggagtcacagtattcccatcactcatcgaaccgggcgtgccgctcgaagaagtaagcgaagcacaaggaattcttccctacttctccgtctccattcctccgctgatgaatgtaatgaccgcgttaattttcgcttttacgctggggttggggctcgcctccctgaacagcgatgcgctaaaaaacgtggcaagggacttccaggagatcatcgtccgcatgattagtgctgtcattctgccgttgcttccgctttatatcttcggtatttttctaaacatgacgcactccggacaagtatacgctatcttaatggtatttatcaaaattatcggagtaattttcattcttcatatcttcctgctggttttccaatattccattgcagcattattcgtgcgcaaaaatccgtttaaactgctcggaaagatgatgccggcatatttcacggctttaggcacacaatcttcagcagccactatccccgtcacactggagcagacgaagaagaacggagtatcctcagacattgccggcttcgttattccactatgcgccacgattcacctgtcgggcagtactctgaaaatcgtagcctgtgcactggcattgatgatgatgcagggaataccgttcgactttcccctatttgccgggtttatctttatgctggggattacaatggtagctgcaccgggtgttcctggaggagcaatcatggcggcactaggtatcttgcagtccatgctcagcttcgatgaatcagcacaagcattgatgattgctctttacattgccatggacagtttcggaacagcttgcaacgtaaccggagatggagctattgctttgattatcgacaaaataatgggcaaaaaccgtgctgaacgactgtgctgaaaaataaattgaaagaggtttgcatatactgcaaaaaatgtcgacatttgcgcccgtattattccaaataaacaattataacgtatgaaaaaagccctaatatcaggcattaccggacaagacggttcgtatcttgccgaattacttttgcaaaaaggttacgaagttcacggtatccttcgtcgttcttcgtcgttcaatacgggacgtatcgaacatttatattttgatgaatgggtgcgcgacatgaaacagaaacgtacgatcaatctgcattatggggatatgacagattccagttcgttaatccgtatcattcaacaagtgcaacctgatgaaatttacaacctggctgcccaaagccacgtaaaggtatcatttgatgttccggaatatactgccgaagcggacgctatcggtacgctccgtatgctcgaagcggtacggattctgggactggaaaagaaaacccgtatctatcaggcttccacttccgagttgttcggtaaagtgcaggaagttccacagaaagagacaactccgttctatccccgttctccgtacggggtagccaaacaatatggtttctggattaccaaaaactatcgcgaaagctacggtatgtttgccgtaaacggtatcttgttcaaccacgaaagcgaacgccgtggcgagacttttgttacccgcaaaatatctctggctgccgcccgcatcgcacagggcgaacaggacaagctgtatctaggtaatctggatgcacgccgagattggggatacgccaaagattacgtagaatgtatgtggctgattctgcagcatgacgttccagaagatttcgtaatcgctactggagaaatgcatacggtacgcgaatttgctacgctagctttcaaggaagcaggcatcgaactccgctgggaaggcgagggcataaatgaaaagggaattgacgtagacaccggcaagccattggtagaagttgaccccaaatatttccgtccatcggaagttgaacagttgttaggcgacccgaccaaagcaagaacattgctgggttggaatccgtgcaagacttcatttgaagaactggtccgtatcatggtacgccacgacatggaaaaggtgaaacgcatgatcgcgaacaaacattaaacggaagaatggaaaagaatgcaaaaatatatgtagcaggacaccacggtctcgtgggttctgctatctggaaaaatttgcagaataaaggatacacgaatctggtaggccgcactcacaaggagcttgacctgctcgacagtgtatctgtccgccagtttttcgatgaagaacagccggaatatgtattccttgctgctgccttcgttggcggcatcatggcaaacagtatctaccgcgccgactttatctacaaaaatctgcaaatccaacagaatgtcatcggggaaagtttccgccacaacataaaaaagctactctttctcggcagtacctgtatttatccacgtgacgccaagcaaccgatgaaagaggatgtattacttacttctccgttggaatataccaacgagccgtatgccatcgccaagattgccggtctgaagatgtgtgaaagtttcaacctgcaatatggaacaaactacatcgctgtgatgccgaccaacttatatggtccgaatgataacttcgatttggaacgcagccatgtactgcctgctatgatccgcaagattcatctggcccactgcctgaaagaaggcaactgggaggctgtccgaaaggatatgaacctgcgcccggtagaaggtatcaacggagacagtccgaaagaagaaattctggctatcctaagcaaatatggtatcagtgaaacggaagtgacattgtggggtacgggaactcctctccgcgagttcctttggagtgaagaaatggcagacgccagtgtattcgtcatggaacacgttgacttcaaagatacatataaagaaggtagcaaggatatccgtaactgtcatatcaacatcggaacaggtaaggaaatcactattcgacaacttgccgagcggatcgtagagacagtaggctatcaaggcaaactgactttcgacagcagtaaaccggacggcacgatgcgtaagctaaccgatccttcgaaactgcacgcactgggttggcatcacaaaatcgaaatcgaggaaggtgtgcgaaagatgtatgaatggtacttgaaataaaaaatcaaacaatctgttgatatgctatcagtataattattttagcttatagcatatcacagactcactcttctctccaccctctccaaaaattcttcatagttaattttccattcttaatttaattgctatatttgcacaatttaataccaaatgtgcaaaaacaatggaacaaagttttatagcttacattgagaatagtatcaagaacaattgggatttggatgccctgacagattacaagggagccacccttcagtataaagatgtagcccgcaaaatcgaaaaactccatataatttttgaggaaagtggaatccgcaaaggagataagattgccgtatgcggaagaaacagctcccattggggagtaactttccttgctacactgacgtacggagcagtaatcgttcctattctccacgagtttaaagcagacaatgtacacaatatcgtcaaccattccgaagccaaactgctgtttgtaggagatatggtatgggaaaacctgaacgaatcggcaatgccactactcgaaggtatcctgatgatgaatgacttcaccctgctggtatcccgtagtgaacggttaactcacgcacgcgaacatttgaatgaaatgttcggcaaaaaatatccgaaaaatttccgtagagaacatatcgaataccacaaagacgaacccgaagaattagccgttatcaattatacttccggaacgaccagttattcaaaaggagtaatgctcccctatcgtagtttgtggtcgaatactaaatttgcatttgaagtattggagttggaagccggagacaagattgtatccatgcttcctatggcgcacatgtacggactggctttcgaatttctttatgagttctccgtaggatgtcacatctacttcctgacccgtatgccaagtccgaaaatcattttccaggcatttgaagaagtaaaacccagtttgatcgttgccgtcccactgattatcgaaaagattatcaagaagagtgtacttccgaagttggagactccggccatgaaaatattactgaaagtacctattatcaacgataagattaaagcaacggtacgcgaagaaatgattaaggcgttcggcggaaacttcaaagcagttatcgtagggggtgcagctttcaatcaggaagttgagcaattcctgaaaatgattgattttccttatacagtaggttatggaatgacagaatgtggtccgattatctgctatgaagattggagaaggttcaaacccggctcttgcggaaaagctgtaccacgtatggatgtacaggttctatcttccgacccggaaaacatcgtaggagaaatagtttgtaaaggaccgaatgttatgctgggatattacaagaatgaagaagctacaaaagaagttatagataaagacggctggctgcacacaggagacctggcgttgaaagatgcggaaggaaatattacaatcaagggacgcagcaaaaacttattgctcagtgccagcggacagaatatttatccggaagaaatagaagacaagttgaacaacctgccctatgtggccgaaagtattattgtccagcagaacgaaaaactcgtcggacttgtttatccggactttgatgatgcttttgcccacggtttgaagaacgaggacattgaacgggttatggaagaaaaccgagtggcgttgaatgctatgttgccggcatatagtcagatctcaaaaatgaagatttatccggaagaatttgaaaagacgccgaaaaagagtattaagcgttatctgtatcaggaagcgaaaggataattatcctcccatgcatttccacctgaaccgagaaaaaagaaatcaagagaaagagaaatatattaaaaatgaagataagaaaaacaatcctcacggcagctattctcatggctgccgtttgtttgccggcacagaacaagagtgcgggtatcaatatttccatttggaaagatatatgtacgcagccgcatgacagtacgcagacgacctatgtcaatatcggtctgctttctacgttgaaccgcctgaatggtgtcggtatcaatgcattgggaagtgtagtgcatggcgacatgaatggagtgcaaatcacaggtttggctaacttggcaggtggaacaatgcgcggtgttcagatagcgggtgtcagcaatatcagcggtgacaataccataggactttctactgccggattagtaaatattaccggagacggtacaaaaggggtaattattgccggtcttaccagtatcggaggagataatacttcgggagtgatgatgagcggttttatgaatgtgacaggaaacatggcttcgggcttccagttctccggcgcagccaatatcaccggacagagttataacggtatggtaacatccggactactgaatgtggtgggcgaagatatgaatggtttgcagattgcaggtattgccaatattactgcccgaaaactgaatggcttacagatcgctttatgcaactatgcaacaaaagcccgtggtttacaaattggtctggtcaattattatagggaagatatgaaaggcttgcaactgggtctggtcaatgccaatcctgatacgaaagtgcaaatgatgctgtatggtggcaattctacagctgccaacatcggtgtgcgtttcaagaaccagctgttctatacaattctgggagtcggttccatgtatcaggacttaaatgacaagttctcagccagcgcctcctatcgtgctggtatttccttccctgtttataaaggactatctatcagcggagatcttggttatcaacacattgaagcattcgacaataaggatgaagtaattccaaaacgcctatatgcactgcaagcccgtgccaatctggaatatcagtttactccaaaattcggtatttttgcaacgggtggttacggacttacccggttctataataaatcaagcaattacgataaaggtgttatcattgaagcaggcattgttcttttctaaaaaagaatgtatgtatagcaaacagtatacaaaatagtgaacggtgaacaagttgctttattacgttgcaacttattcaccgttcattgttaatcactacttactattcttttatatcttctcttttatcaatccggtacgataagcaacaagtagcttttttaaatcctgaatctgcgttaccagctcttttcctttatcagtatctttcaccatcattcgttgtgaattgaattccagtacaaaattggtagacttaatatccagcccttcctcaattgctttctgccgcgactggaatggttcatgctgtacaagctgcataccgtgagaatggtaaacaagcgtatatcctgcaatccctgtttccggctgataagcctttgaaaatccaccgtcaatcacaaaaagtttgccgttagctttcatcggctgttcgccctgaatagtctttaccggcacatgaccattgatgatatgcgaatgaggacccgaagcaccaaattcttccagaatccggtcacaaatatcctcacgattacgcaatgtataataatgccctttcttctctttgtgcagttctttatcttctacaaaatagcgctcaaaagtagccattttatctttatcaaacagaggagcttcaggaccgcaccacatataccaaatatagtccatagcaaattccttatcctcctctccttcttcgtcaaagtaagcggtacgaatcaactggtcggccttatccagtagcctacgtccccagtattcctttccccggattttgacacgcttgaaactgccatcttcatttaaaggtacggaagcatgataaagaagattcgagttggaaaccaaatacatcccgccatacgtaaacagacagcgcatatgtttcttcaacttctcactattcataaatgaataatgaatcttttctaccagttcacgttcctcttctgtcagccgataaggattggctgggtctactgtcggaaagttggtatcacgcaggacatattcttttccctcgtacacaaagacaccacggtcgaagtctatcttctctaaaagtttccggttcgccatgccgaattcaggacgacggtcgatgatttcagcctccaacttaaactggatgatagtaatcgctttatgcatctgggtaatcaaacgcagggttttctcattatagtgagcgtcggcaaaattcatcttcggcatgaagatagtacagggatcatcagcataagtatccatagcaaaggtagccaatggcagcagattaataccataaccatcttccaatgtgcccaaattaccgtaacgcatagacatacggatcacattagcgatgcaactgtcattgcccgaagcagcacccatccaaagaatatcatggtttccccattgaatatcaaaattatgataattacataaagtatccatgatgatatgcgcaccaggaccacggtcgtagatgtcaccgacaatatgtagggagtcaatagtcagccgttgaatcaggttacacatagcaatgatgaagtcatctgcccgctttgttgtaataatcgtactgataattacattgatataagcatgtttattcggttcgatagacgattcatgcaataattcctgaataatataggagaactcggcaggtaacgatttacgcactttagaacgcgtatacttggaagacacattctgacagaccttcaccagttggttcagagtaatcagataccaatcgtccaaatccttctcacgagctttcaccagttgaagtttttcttcgggatagtaaatcagcgtacagagttctttcttttccgcttcacggagagtattgccgaatatttcattcactttacgctttaccgcacctgaagcatttttcagtacatgttggaatgcttcatattcaccatgtatatctgtcaggaaatgttctgtccccttaggcagattcaagatagcctccagattgataatttccgtactagcatcggcaatagtaggaaaactacgggaaagcaattgaaggtagcggagatcgcccacaatactttcaggagttatattactttgagcagtcattctattttattacaatttactaattaacaattactttgcttcctatgttcgttgttcggaatcattccattcagttatccgtgataaatatatttttttatttactcgtttacaattttcatataaaatttattttcaacctaataagaacatcaacagtacttgtgcaataatcacccgtagaaacatacacaatggatatactgtcgcataggctacagacgggttatcaccgggaattgtatcatttgcataatttaatgccataggattcgccatacttccgcatagcataccggacactgtgccaaaatcgatcttcatcatcttgaaggctacaaagcccactaaaacagttgggatgattgtcagtccggctcctaaaccgatccacagtagcccttccgaacggaataccgtatcgaagaaatgtgccccagcatccagtcccagacaggctagatacattgagagtcctaaggcacgtaacatcaaattggcactacgagtagtgtaggtaatcatgtgtatccgtggtccaaacgtacctaaaaggataccgacaataataggaccacctgccaagcctagttttacaggagtactgatacccggaatagaaaaaggaatagcacctaacgccaatcccaacacgataccaataaatataacaaccaaattaggttctttcaaactcttgacagcattacctagtactttttccacgttttgaatggctgccttttcccctactaccgtcagtcggtcacccaactgaagtatcaatcccggagtggcgagcagttgtacacccgaacgatagacacggctgatattgattccataatgatttctcaaccggagcgctcccaatttcttcccgttcagttcagggcgagtgacaacaatgcgctgggagaccagttcactgtcaatcgcattccagtcaatgtcctctttgttccaatccgtattttcctgttcgccgaaaagcacagtcagagccagcgcatctttttcagccgtaatcaccagcaagcgatcaccttccttcaacactttatcagaagtcggaatactgacatgtccgtcacgccacaaacgggaaataacaaacttaggataactcaaatgagctatatcctttatgcttttattgaaaatagcaggattatgtacttgaaacgctgcaatataggttttgttcgcatcatccttctcctttatttccaagtcttccttgcgaaccaatactttacgaattaacaaaacggcaagaatcacaccgactactcccattggataggccacggcacatcccagagcaggcgtactactatccatgcccatttgtttcaatgtctgctgcgccgctcccaacgccggagtgtttgtcgtcgctccgcaaagaataccaaccatatcgggaagcgatatacctgtagcataactggctaccaccgttaacaaagtacccagaagaacaacccccaacgccaacatattcaacgtcactcctcctttccggaaagaactgaaaaaaccgggccccacttgcagaccgagagaataaacaaagataaccagaccgaaactttctgcgtaattcaacatctgcgggtcaaccgaaagcccgaaatgtccggcaagtataccggcaaaaaaaacaaaagtgactcccagggatataccccagaaatgcactcttcccaagcccagacctatcgcagaaatcagtgaaagtaccacaacagcctgtaaggcagaatgttcgagaaatagactagataaccactccatgtatatataaaactaatagggcgcaaagataaaaactatttagtcccgttcaaaacttttatgctttcatttcgcgccctatttatactctaacccttattcctgaaatcctattggcaaccttttacctctcctacctatcattctgtcattaacccctgacacatttttatcttatccttctttgtcctcgtctttctagctacatcttgttatctccgatacctattgtttttttacctgcttccctgatattccacaaagttatcccttccgtccagataaccgcttaatctgtttccaccaaggtacacatcatccagataggaaacatcacccggaccgtaggacatcctgatagatgtttgtgcatagttttcccagttccaccggaaattatattcaaaaacttccacatctccgttacggtattccactcgtatgtaatcaacccctgtacggtctaaataaaaatccagttcttgacaacaacggttcccgtctgcgtcacggtaataactgatccatgtgcgactgcacaattccgacgaacgggaataatacccgccaccgatattatcatcatcataaaagctatcaatttctacttcgcaagaagtaaggctaatcatcatcaatgccattaaagctatacctaagtatttgaatgcgttcgttttcataatcctttatttttatggtccttatttatatcatttatctttcgatatgacaaaagtatagaatgaattttccttatgaaactgaaaagtcctacttgtacggaggaaattgcctaattatggaggtaaatccctctgtacccaataaacctatctcaaagaaatctcgtatctttgcctccgattaccaatatatggaaacagatatcatcaccgtatccgactttgagatgcgtcccgttgattatatgttagcccgaagcatagaacatgcaaaagcaaaacaaacaaaaatgtatgctatctccttgggaggtaagagtgccgagacaagttacctgcaactatgtgataaatattgggaatatagcattcaaagcagtaaaaatcttaataaagattgaatagtagaatgaattatttaatcaatgttataaaacatctgttttttcttgctttacttgctaattttccagaagtccgtatctttgtaatgtgtttttcatagtattagatttaaggttaacaaaagattggctgtctgggatagatagcctttttttatgctctgaaatatagcgtcactgtccggtcgacatagttaccctatctcactaagataccgtcaatatcgcaagcagataccgtcaatatgtttcaagttctttccttcgtaacaaaaaataaaagatatcgaaaaaaaaatcattcgtttaacatttgaaacatagcaagttatctgatttttcaaaaaacagactaaaaaaatcttgctaaaagatttgcgtagtccaaaagttccccctatatttgcaccgcatttgagagagaatgcgggttcaaggaagtttgggtgagtggctgaaaccaccagtttgctaaactgacgtactcgcaagggtaccgggggttcgaatcccccagcttccgcaaacaaatctcaagagaaaaagagctaagtttataagacttggctctttttaaatccataaaatgccggtgggttcgtctaacggttaggacacatgcctctcacgcatgtaatacgagttcgattctcgtacccactactaaataaaagagggaatgtagtttaactacatttcctcttttattttatatatcttaaagtaggaatctttatctatcctcagccggattctgtcttcccgcttttgcccagccagattaacaaataagttaaagtataattgactaaaagaaagctcggaatgatcataagttatatcaaatgtccaggtcctgcgaaatgaatcaaaagtagcaaaagactgttcccctcctttacacataaagacttccgggaaagacgctggcggataaggctggaataaaccggccagttgagcataaacataatcaatcatccattcatcgtcggttaaagttaactctccctttaaacgaagtttaatggcataactagcagtagcatctgcggaagtataaacaggaatctggctttctaccggataattaccgtctttgtaaccgaggctcatagtcaatacggatttacctacaccattgaactctgcaacctcccgggttcccgactgatttttcagattaatcataaacgtcagcttgccaagagtcggatcacccggatactgcgcaagcgtatccaatacataatcctcttcattatagctctcagccaccaaaatactattagatcctacttccagagccggaccgcctttttcaatatccacattacccacaggataatatatcgcatcattatccttcacacaactgcaaaaacaaagcagcaatacagccgctcctataattttattcatcatcgcctacatcttgattttaagtacaaagatacatcttttttgtgccacacttgatttatgtcaaccgtttttagtatttttgcacacatcaagacaaaaaagaaatggacacactattaagagagacagtaaacgccgttgtaaactcccgctttccggagatgagtatagagggaagaaggcagatcgaaaacattctcattcgtgaagaatatccgaaaggagcaatagcactgaatgaaggagaagtagcccatgaaattgtttttgtcggcaaaggaatgcttaggcagtattactataagaacggaaaagatgttaccgaacatttctcttacgaaggatgtatcgtgatgtgtattgaaagtttcctgaaacaagtaccgacaaaactaattgtagaaacattagagcctgttgttctttacatgtttccgcgggatatgctatttaagttagccaaagaaaattgggaaatcaatatgttttatcaaaaaatactggaatactctttaatcgtatcccaaatcaaagcggactcatggcgcttcgaatcggcacgtgaacgttataacctcctgctcgaaacgcatccggaaattatcaaacgagctccattggcacatatcgcctcttacctgctgatgacgccggaaacactaagccgggtacgttccggcgtcttatagtaaaaaacaacgcacaatgaagacaaaacatatatgataacagaatattccgttatcggcttttgcggtattctttaggagacataccggtataatgcttaaaatatttcccgaagaaagactggtttgcaaaattgagccggtcggcaatctcttgtatattcatactcgaagaattcagaagcgcttttgcctccagaatcaccagctcatcaatccactcccccaccgttttaccactgacttctttcaccacacctgagagatgtttcggtgtcagacacaactggtcggcataaaatttcacactacgttccgattgataagattctatcagagattcatagaaacgctcgaatatatactctttccgacttttattcttcaccgtagcggcggcagtcggaacatggctattaaagatattgcaaagttcgaagaaaaaaccttgcatcagtcccattacgacttctctacgatacaagtcctccttattcttcaatcttttcctgataaaactataatattcccggataatatcctgttcatgcggcgtaaggtcaaaacaaggataatctttcaaataaaagaacagagaaagtacattccccactttaggcaatgcttccagcaaattctttgataccgcaaagaaaatagccttgaaatcaggactaaaccacctatgctcgataatctgattcggcaaaacaatcaccattcgtcccggaactatttcatactcgcgtaaactaatattaaatttactaccacctcccaaacagaggcccactgtaactacctccagcttactaggtccgctatacaaggaaacaacgctctccgtatcgaagagcgctatatcattgtcaaccacatcaatgcagtcaggatctatatgcttggaatgaactaccgaagaaatacctattttcggaacaccttgaatctccatactctctctcttttttagtgacaaatataccagctattaatcagatatacaaccaaacaaaaagattatctgacaaaatgaacaaaattagttacttattgaccaccccgaataaatactcataatcatgtttggcggcagggactgtccactcttcaggaataaatttccactggttcaacgccttcgggtccattatccctttcttctcgatataattcatcagatagaagcgaaggtccttgtccgtagagaaaataatacggtctttcaatttctcctgtggaatcccggagcctttagtcagtaactcgccaccaccgttaccgcgataagagttcagagccaccttatataccttgttcataaggaaaggagagccatcggccatactggcaatcgtcaccttctctccttgtggtttggtgacatccaccgtataaataatgcctgatgccgaatcaaagttaaaactgtaattctggaaagaggccctgtcctccgcaccttcgcgacgcttctccttgaaccagagcaaatgatcgtccggcgatttcatccgatttgtccacatataataagacatttccaaaaaatctttaatttcttttcccgacaatgtcatcacgtaaagcatattctcgtacttatacaggttgaacatatcactgacagacacatccccttcctttatttccgcatcaaatgaaagcggagcagcgaaagaaacatccgcccccgtaatatcaagctgcaacgtatgtatcaaatcaatgaaagcagaaggaccgaagaaagaaggatgagtagagatactttcagtaaatgtacctatctttttggatacaaacctcttcacggtctcatactgagaagcgaaatgtttcataaagtcctcgctgactccataatctttcgtttcagtaagtctccccctgatatctttatccaccaatttcccgtctttcaatttcagagtgacatccacattagagagcaccaccccgttgctggccgggtcaataatcaagaccgaatctccgacaatattcaccaccttcttacattcacgggcatgatcatgccccattaataccatatcaaatcccggtacattcttcgccacattcagagatgcgttctcattatatttgccggacattttgaacgcttcctgccccgcatggaacaagccaatcactaagtccggattctctttttcacgaataatcttcatccatttacgagccgtctcctccatatcgtcaaaatgcaatcccttccacaaattttcggaaagccatgcaggaatagccggggtaatcattcccaagataactattttcacaccgtcacgcctcagtaccttgtacggtggcagatacgtttctccggtagacgtatctatgatgttcgctcccaatatagggaaatcacaagtcccgatccaacggttgaacacactgcgtccggtttccacatcatgattacccatattgccggcatcatatttcatatagttcatcatctccgcacaaagataaggagataccgtatctatataattatagtaataagctgtaggttgtccctgcaagatatcgccattatcgagtaaaataagattctctttatactcccggcgctctttctgtacaaaagaatagattcgcgccaagctgcctttccattcctgacgggttataaagttataaggataatagttgccgtgcacatcacttgtttgtacaatcttcagcttcaccactttttcctgcgccgcaacggacagcacgaggaaaagaagccaaacataaatcaatgtaaatcgtttcattctttttctatatttagcgggtgagagaaaacaaaccgtgcccctcctgtgtaatcaggatcaatccatatctctcctttccatttatacacaatcaatttacagatagacagtcccaaacctgtcccctgcgcatattcattcagtttttcaaaacgctcgaacaccaacgcctgtttctccttcggaataccgcatcccgtgtccgtcaccgaaaagacagccatttgcgtctcctcattcaccgaaaaatccaacgttatctttccctgttttgtaaacttatcggcattggacatcaaattgataatcacctgctgcatacgctgcacgtccgtctccattcggaaactctcgaaagatgtattgaatagaaactgattatccgaccgtcgcgagaaactgacagaagccaccacctggttgcataactgcaccacatcacactcctcccaagtcagcgtcacccggttcgcctccagacgtgaaagatcaagaatatcgttaatcaggcgaagtaacaaatctgagttcgtcttaataatctgataataggactgttgttcctcctctgtgctgccgcctaccgccagtacatccgaaaagccgacaatagaattcaacggcgttcgtatctcatggctcatattagctagaaaagcacttttcagacgattcgattcttccgccctatccttcgctacacgcagatccttctccgatttcaacaattcatccctcaaacgtttcgtgcggaaataataaaacagcgaaatacataatccgagcaccaatatcacaaacagcgcacaagcggaccaaatctgatacgtatactgctgatagaaagaaaccggctgattaataagctgcacatcaaaaggcaagactttcggattcaatccccattccttcacctttcggctatccaatacagccttacaaccaatcacggaaagatgtttcgccgtatctcccggctgactatccattcgtacagattcctgtgccatttcctttcccactttccgatagtcaggaagcacgccgccaattgcccaagaccccaagctcaccgaagaaggtgtaaaagccggaatagcgggagtcgcctccatcatggcataagtggcattccgcatgaaatacccctcattcatatccacacgccaagtccccaccataataaccgtattttccggcaaatgtctcaactcctccacaatcgtgtagatagtatgcttacgcccgtccataagaatcaaatccaaatcggggaacttttccatttccttccgtaccaatgcctgcatagtcacaccgccatacgtattatccgatataaaagcgatatgctccgtttttggataaaacgtccggagcatacgtatattcccctctatgtcatactgattaataaagcccgattcgagttccggaatatccatgtggtcagcaaaaatatctacggattcgggcatccagctatcaagattcttcacggtatccttcggtaatattacgatattactactcgcgaggctacacatgaccggcacttttatctgcatcgaatccctttgtgacaaataagccgcccatgcttcctgacccaataaaataatttgtcccggatgcttctctccctggtatttagaaagaatctgcgtcatcatatcactccagagcggagcttccgagaaacttttacagttcatgttttcaatgataatgtcacgctgccctcccagtttgccatattcttccatataatcggaaatggtgaccgaagtctggtgcgctgccggattataggagcagataatcagaatgggattcttatctttagagacagcccatgcccccataggcacgaacagccaaagaatacagacgaacaggtatcctacatatctcgacataattgtgttgttttaatctgcgaccttttttattttgcatgcaaatataacaaaacttgtcgggtataacagatttatatgtatttttgtcgctcattcattttcaaaaaactgtttatggaattatttcacaagatgatttccggatcattaggcataccggaaagacaaatcgccagcacccttcatcttttgggtgaaggtgccactataccattcatcagccgttaccgtaaagaagctacgggtggactggatgaagttcaaatagagcagatcaaggagcgacacgataagctgtgcgatatagccaaacgcaaggaaacgattctcggtactatcaccgaacaaggtaaactgaccgccgagctcgagaagcgcatcaacgacacctggaaccctacggaactggaagatatctatctcccctacaaacccaaacggaaaacccgtgcggaagccgcccgccaaaaaggactcgaaccgcttgccacaatcctcttgctacaacgggagaataatcttgccgtccgcgcctcctccttcgtcaaaggtgacgtgaaagacatagacgatgccctaaaaggtgcccgtgacatcatcgccgaacaagtgaacgaagacgaacatgcccgcaacgcagtgcgtaaccagttcggacgacaggcggagatcatcgccaaagtagtgaaaggcaaagaggatgaagctgccaaataccgggattacttcgacttctccgagtctctgaaacgctgcacctcccaccgtttgctggctatccgccgtgcagaatcggaaggactgctgaaagtctctatcactccggatgatgagacgtgtatcgaacgtttggaacgccaattcgtacgaggcaataacgaatgcagccatcaggtaagcgaagccactgccgatgcctacaaacgtctgctcaaaccctccattgaaacggaatttgccgcccaatccaaagaaaaagcggacgaagaagccatacgcgtgttcacggaaaacctccgccagctactgcttgccgctccattgggacagaaacgggtgctcgcaattgatcccggattccgtaccggatgcaaagtagtttgcctagacgcacaaggtaacctgatacataatgaaaatatctatccgcatcccccggtcaacaaacccggcgaagccgcttccaaactccgcaagatgatagaagcctatcagatagaagcaatctctatcggcaacggaacggccagccgcgagacggaagactttatcaaccgtcagacgtttgaccgccaaattcccgtattcatggtcagtgaacaaggagcttctatctattcagcttccaagatcgctcgcgatgagtttcccgactatgacgttacagtacggggagcagtctctatcggccgccgtctcatggacccattggcggaactggttaaaatcgatcccaaatctatcggcgtaggtcaataccaacacgatgtggaccagacaaagctaaagaaagcactcgaccagacagtagaaaactgtgtcaacctcgttggtgtcaacctgaacacagccagtagccatttgttgacgtatatctccggcctgggacctcaactggcacagaacatcgtaaactatcgtgtagaaaacggagccttcaactcacggaaagaactgatgaaagtcccacgcatgggtgccaaagcctttgagcaatgtgccggctttctccgtatccccggagccaaaaatccgttggacaacactgccgtacatccggaaagctaccacatcgtagagcaaatggccaaagacctgaaatgtaccgtcgacgaactgatagctaacaaggaactccggcagaaaatcaatatctccgactatctcactcccaccgtcggactgcctaccttacaggacatcctacaagaactcgacaaaccgggacgtgaccctcgtaaaaccattaaggtattcgaatttgataagaacgtacgtacgatcaacgacttgcgcgaaggaatgatacttccgggcattgtaggcaacatcactaatttcggtgccttcgtcgatataggtatcaaggagaatggccttgtacacctctcccaactggccgaacgatatatttccgaccctacggaaatcgtatccattcaccagcaagttatggtcaagattataaatgtggataccgaccgcaaacgaatccaacttagcatgattggggtaccgcaagactgatcgcctctctcttttccccccaccaaacaatcagaatcgtcaatacaatcataagtactgtgcaaatgagcgagccttcaaacccgaaggctccgccattcagtacattgtcctcgggcagatgcaaagtcagcatagaagatatgaaattgttaccactcacttcgtagcccaacaccggtccctgaatccagttccagaaaagatgaagggagatagggaaacaaagattctttgtatacaagtaagaagctcccagcagcatgccagcaagtagcagattgagcataggcaagaaatctatttccggattgaagatatgtaacaaggcaaacaatgctgatgatataaatagcgacaggaatttattcatacgtgtatgaagcagtcgtccgagaatatagccgcgcatcagaatctcttcaaacaacgccaccaacagaaaaaagacccacgaaccgagcaaattcaccgattcaaacttaaaaccggtcacttctatttctcccaaaagcagagacagtccgaagccaaccagataaaacagaacagctatcagcaatccgtaccacaatcctcgcgcatgtcctttgacagacaagcccaagtctgagaacggacgccgttcaaaacgaagcatgataacagcagaagtcaaagcggccaaaaacatacccatctcttgcagaatataccccactattccggggtgacgggcctccactccaagaaccaatgaaaggaatccttgtatcaatgcactatacaacaacataaacacaaaaaacaccactataaacagcaaaatacacgcccatataggaagtcccttcagttcttttttatccacaatgttttctgcctccatttttacaatttgttaatccggctacaaaattagatataaaacataaaaaaacactatctcttacctatttttcctatatttgcctgaacaaatctgcaaaattatgaaaattaaactactattgattagtttcatattggctgccaatgcattaggagcagtcgcccaagtgagcaagacttattttgtaagtaaacccggaacgctgatttccatgatgacggaggatgaggccaacagtatcacccacctcactttgaccggtaaaataaatgccgaggacttcagacatctgcgtgatgaatttcccaacctgaaagtattggacatttcgaatgcagacatcaagatgtacaccgggaaagccggtacctatcccaacggaaaactttgcgtttatatgccgaacttcatccctacttacgctttctcgaacatcgtagacggagtgactaaaggtaaagccaccctggagaaaataattctctccgagaaaatcaagaacatcgaagacgccgccttcaaagggtgcgagaacctgaaaatctgccagatccggaaaaagacagctcctaacctgttgccggaggcattggcggacagcattaccgctattttcgttccgctgggcagcagcgatgaataccgttataagaataggtgggaaaagtttgctttcatagagggagaaccggtagaaaccactttgcaagtgggagcaatgggcaaactggaagaagaaatcctgaaatccggtctgcaacccagagacatcaacttcctcaccatagaaggcaaactggacaacgccgacttcaaacttatccgcgactatatgccgaaccttgtttcagtggatatttccagaacaaatgcaacagctatccctgactttactttctcacaaaaaaaatatttattgagaatgaagttacctcataatctcaaatcgatcggacagcgtgtattcagtaactgcggacgtctttgcggtacactcgaacttccggccagcgtgactgctatcgagttcggcgcatttatgggatgtgacaatctccgctatgtattggctacgggaaataagatcacaacattgggcgataacctgtttggagacggggtgccgagtaagttgatttataagaaataagtaaaggaataaccttgatatatagagtatagccctatatcagagtaagacaacggttataaactaagtccgagttaacacatttctacccctcgtatttaataaatcaatttttgttgttgcataattctatggaggtgtgtcaaaatgcgcaccttcttttttttaagcacaaagccccgactttcacaagctggggctttgttattacctaaagattttgtatctttaggcataagattttcactatgacaaagatacattttcgtccttataattccaaccaaacagtgctttttcctcaaagaattgacgaggatattgcagagcatgatccagttcggatggttgacgctctggttgagagcctgaaccttgaaagtttcaggaagttgtataaggaatgcggccgcagcccttaccatcccaggatgatgctcaaggtcattctctatgcctatatgaacaacgtctactcctgccgtaaaattgaaaagctccttcatcgtgacatccattatatctggcttgccggatatgagaaacctgatttcattaccatcaaccgtttccgcaaccgggtgaaaaaggaaatcaacgaggtatttacccaaaccgtactccttctctcttccaaaggcttcatcaggctgaatgtggaatacattgacgggacaaagattgagtccaaagccaataagtatactttcgtctggcgaaaaacggttgagcggaactgtgaacgcctgatgaagaagatacatgtcctgttagggcagatagacgatgtcatcgcccaggagaactcatcggaaagcaatgaggagattgagttcactccggccatgctgactgaaatggctggagaattgcggaaagcacttgaacaggttcctgagccctccacgaaagaggaaaagactgcgttgaaaaagaaacgcaaacagctgaaggaactggaagaacacagggacaagctgcaggaatacgacaaccgtctgaacacgctacaggacaggaactcctattccaaaacggacaaggacgctactttcatgagaatgaaggaggatgccatgcgtaacggccagacaaagcccggttacaacctccagatcggcaccgagaaccagttcattaccgattttgcactcttcccgaaccctacggatacactgaccatgatacctttcctgcaatccttctcaagcagatatgacaggttggcccatacggtggtggccgattccggctacggttctgaggagaattaccgcttcatgtcagaaaacggtatggcgggctacgtcaaatacaactacttccacatggaacagcggccgagattcaaaccggacccgttcagggcggaaaacttctactacaatgaagaacaagacttttgtatctgccccatgggacagaagatgcaaaggatagggactagacatgtgaaaacagcatccggatatgtcagcgaaaatgccacgtacagagccatcagatgtgaaggctgtccgctaagatgccgatgttttaaagcaaaggggaacagaacgatagagttgaatcacagactcagaaaatacaagcaaaaagccaaagagctgctctgctcagaggaaggactgaaacacagaggacagagatgcatagaaccggaagccgtgttcggacaaatgaaaaacaatatgaattacaaacgtttccgccattttggaaaggataaggtcttcatggacttttccttctttgccattgccttcaatataaaaaagatgtgtgcaaaaatgactaaagaaggtatggattggctgattagaccgttttatgagcttacagttgctctatttagatgttgcgaacacataaaccaaagaaatcctcaaaatatcgcagcttaaagaaaatgaaccgatttttatagtcaatgaaaaaaaagaaggcgcatcgtgtattacgacacaccttcataaagttatgtatagcgaatgctaattcatagtagctccaaagttacttgaatgacaaattatccctaaaaaagagagcgtatcaagacattggtttttgatacgctctcttttttattatcagtaatgtccggagtcttacttatctccgtacatcttcgctctcaattctttaatgtggtctgacgtgatatattcgtcgtattccatcatcttgtcaatgataccattcggcgtcagttcgatgatacggttggcaacggtctgaataaactcgtggtcatgagacgaaaacaggatgtttcctctatacgttttcaggttgttgttgaatgcctggatagattccaaatccaagtggttggtaggagtatccagaatgaggcagtttgcccccctgagctgcatacgggcaatcatacaacgcattttttcacctccggaaagtacgctcactttcttcagtacttcctcaccggagaacagcatacgcccgagaaaactcttcatatacacttcgtttccttcgccaaactggctcaaccagtccaccaagttcaggtccgtattgaagaagtcggtattgtccaaaggcaagtaagcggtggtgatagtcaccccccagttgaaggttcccgaatccggttttatatttccgttgatgatttcaaaaagtgcagtcatggcacgcgggttacgtgacaggaatacaattttgtctcccttttctacattgaagttgacatcgttgaaaagcactacgccttcttccgtcttcttgctcaatccggcaacttcgagaatctgattgcccggctcgcgttcgggagtgaagataatacccggatacttgcgtgaagaaggtttaatttcttctacattcagtttttccagcattttcttgcggctggtggtctgcttactcttcgctacgttggcactaaaacggcggataaattcttcgagctctttcttcttctcctcagccttcgccttctggttctgctgctgacggagggccaactggctggattcgtaccagaaactgtagttaccggcaaacatattgatctttccatagtcaatatcgactgtatgcgtacagacggagtcgaggaagtgacggtcatggctcacaacaagcaccgtatgttcgaagttggaaagatattcttccagccatgtcactgtctccatatccaaatcattggtaggttcgtcgagaaggaggttatcaggatttccgtacaatgcctgcgctagcatgacacgtactttctctttaccactcaattcgcccatcagtgtgtagtgcttatcttctttgattcccaaaccgctcaacaacatggctgcgtcactctcggcattccagccgtccagttcagcgaaccgttcttccagttcggacactttcagtccatcttcgtctgtaaagtcttctttagcatagagttcttcgcgctgtttcatgatatcccacaacacggtatgccccatcattacggtatccataacggtaaaagcatcccatttgaagtggtcttgactcaacacggagaggcgctcgcccggtcccagagcaatcgaaccggtagtcggatccaaatctccgtaaatcgtacggaggaatgtagattttcccgcaccgtttgcgccgataataccatagcagttaccactcgtaaatttcaggtttacgtcattaaacaacactcttttaccaaactgtaccgaaacgtttgaaactgtaatcatcttacctatttactatttaactatttacacttttcaatttgagtgtgcaaaggtagacatttaaaatgaataatgaactatcccgtatgtgccaatctgacataaaagtattacctttgcagagttttttggcaaaaacaccaacttggcaaagtttttgcatgtgattttgatattatgaataaaaaacagaaatagatatggaccctaaagaaaaaaaagtgaaggaagaagaactcaacgttgaggaaactctgaataacgcggaagaacaaccgcaggacgaacaagcggaaaatgccgtcccgatgactcacgaggaggaattggaaaaggaactggagacggctcaggagaccattgaggagcagaaggataaatatttgcgtctctccgccgagttcgacaattaccggaaacgcactatgaaggagaaagcggaactgatcctgaacggtggcgaaaagagccttagcagtattcttccggtggtggatgatttcgaacgtgccatcaaaacgatggaaacggctacggatgtccaagctgtgaaagaaggtgtcgaactgatttataataaattcatggctaccctggcacaaaacggtgtgaaggtgatcgaaacgaaagaccaaccgctgaatactgattaccacgaggctatcgccgtaattcccgcaccgtcagaagcacagaaaggtaaaattctggattgcgtacagacgggatatacattgaacgataaagtactccgtcacgccaaagtggtagttggagaataagaagaacttgaatcaataaaagcatggcagagaaaagagactattatgaagtactggaggtaacgaagacagccacagtagaagaaattaaaaaagcctaccgcaagaaagcgattcaatatcaccccgacaagaatccgggtgacaaggaggcagaagaaaagttcaaggaagcggccgaggcgtatgatgtattaagtaacccggataagcgctcgcgttacgaccaattcggccacgcaggagtgagcggtgcggcaggtaacggtggtccgttcggcggtttcggtggcgaaggtatgtctatggatgatattttctccatgttcggtgacatcttcggaggtcgcggaggaggattcggtggtttcagcggattcggcggcggcggaggttcgcagcagcgacggtatcgcggaagtgacctgcgcgtgaaggtgaaactgacgttgaaagaaatctctaccggagtggagaaaaagttcaagctcaagaaatatgtgccgtgtgaccagtgccacggtagtggtgccgaaggggacggcggttcggaaacgtgtccaacttgtaaaggtagtggtacggtgatccgtaaccagcagactattttagggacgatgcaaacgcgtgccacctgctctacttgtaacggtgagggtaaaatcatcaagaacaagtgtaagaagtgtagtggcgatggaatcgtttacggtgaggaagtagtgacagtgcagatacctgccggagtggcagaaggcatgcaactttctatgagtggcaaaggaaatgccggcaagcataacggcgtgccgggagatttactgattctcgtagaagaagaaccgcatccagacttgattcgtgacgagaatgatctgatttataacttgttgttgagttttcccactgccgctttgggcggggctgtggagatcccgaccatcgacggaaaggtgaaggtaaagattgactcaggtactcaaccgggaaaggtacttcgtctacgcggtaaaggattgccgaacgtgaatggatacggaacaggggatttgctcgtgaatgtcagtatctatgtgccggaagctctcaacaaggaggaaaagagtgcgcttgaaaaaatggaagattcggataatttcaagccgagtacgtcagtgaaggaaaagatcttcaagaagttcaaaagtttcttcgattaagacttacataaaaatttcttcctattaataattaaacgctccatgaatgcctggtgacacatggagcgtttgttatttaaaacccactcaataccccggattctgtactagctttgtattcatcacccgtattttctcgggaatagggaatacggtagtataaccggtttcctcgtttggtaattgaggacggctgttgtatgcacgagtaaacattccgaagcggataaggtcctgacgcctccaaccctcccaagccaattcaagctggcgttcggaaagtatattctccaaagtagcgggacggcgagcggcctttacccggctccggacttgatttagctcgacgtctccgttttcaccgttgcgtactttagcttcgctcttcatcagtaaagcgtccgcgtagcggaacaggacaatgtcattctccattaattttccgtcttttgtggcggtggggtctacttcatactttttcatacgggcacctgccgtttgctcatacggggtgtcggtgatatccaatgctacttcccaagggaaatataccaagacagtaccgtcgtccagcttgataatgtctcctttcaagtcatacatttctcctgcaaaataacagatgtcgaagcgaggatcttgggcagctgtcccataaccgaaagtttcgagtgcttcaatcgttgcactgggaccattctcaccgcttagcccgtaagctttggcatggttgtaatgacgggaacgaaaaaggtattgcatctgattggtatacaatgttttattcatcgggatcgtgaatatattctctacggacggttcattgaagatagagaagttagtctcgtattccggttccagtttataattcataactttcagttggtcgcagtagtatatgaccgtctcccaggcattgagttcattaccgtctaccatgaacttgatattttttccgtcgggacgttcgttgtccgtccagtcgttatcggtataaacttcggcattcagtgccagttttgccaacaagaaagtaaccaccggacgagtgatacgcccataataaggcccggactgattgctgtgtacctccgaaagtaatggagccacttcctgtaattccttgaatataaattcgaatactgtcttccgctcgctttgaacgacgtctttcatcgcaggagaagaagactgcaccaaaggcacacggccaaacaaatccagcagataatagtagtacatcgcacgcatagcacgcacttccgctcgataagccgggagttccgcatcagaatgggtttctgcgaatttgtcgattcgttcgagcgacttattactaagcattacgactttataaagatactcccatgtagcttgaatggcatcattctcaataccccaatcatggagaaataatccctgccaaaagccaccgtcgtaccagtcgccaccgcgcgtagggataatagcttcatcagtagtgaaagtattgaggtcatagacacctctgcccgttccctgcaatccctggctatcgctgtaaccgcccacataagtatagagcgaagcaacagcattgagatagacttccgaaatggaattatacacatcatcttcgggcaacttatctttcggattttcttccagaaatttatcgcaggaaaacaagaacgtacacgtagcaagcaccaaactaatctttttcaaatattctttcatcttctcatcctccgttaaaagttaatactcaatcccaatgtatagatacgtgccaacgggtagttacgtttatcatccacccccaaagtagagtttaccgtagaactgttaatcatcggtgatagccctgaatagccggaaatcgtcgccaggttgttgaccgtgaaggcaagacgcaaagaacggacgtacttcttgagtttctgcaccttctcgattggtacattccaaccaaacgtcacgtagtcaaagtttacgtaattgcctttttccagccaatagtcagtggcagtctggtccttaatgttctgcttcggcgcggatttcatcacattgtagtcagggaagatattcatgttcatatacgtcagtgatgttccgttatagattttatggccgaaagctccgttgatctgcaccgaaagatcgaagtgtttgtaacggaagctgatgttcgaacccagaattgttttgggcacggcttgccctgccacatagcggtcttcgccgtcttcaagattgacaccaccaccgttcaagtccgcaataccataggtgtatccaccgttcccgtcggacaccagtccggtgctatgaggcaaataaaaaacacctaacggttgaccgaccatttgatagacgatgtggttgtagccaccgtggaagccggctccgtcgagactggcaaggctcttgtattcaggcgcggaaatcatttcgccgttgtacattccgcttaatgagagaagtttgttacgttggaaggtgacattggcattaatgttcaattccatatcttttgttttcagaggagtgataccaatagctatttccgtaccccagttacgcatggagccgatattagccagtaaagtgttgtaagtgaaaggcggtacactcacattatacagataaagcatatccgttgttcgggaattgtagtagttagcggaaagtaacagacggttaccaaacaaagttacgtcaaaacctgtattgaaagtgtgtttcacttcccacttcaagtcggggttcgtattcctcaaatcacccaatgagacaacggcagagttgcctaccggaacaactccgttcggctttaccagattcagtgtagtatacgagtcaattccactctggttacccgccagaccgtaaccgatacgaaatttcaaattatcaaccactggcaaacgtttcataaacttttcctcactgactacccatgcggcagatatggagggaaagaagccccacttatgatttgctccaaacttggaggaagcgtccgtacgggcattcagcgtcaggacataacgatcggcatacgtatagttgaaacgtcccataaaagatgcgagacggggttgttcgtagtacgaatttgtcccctcccacagacggactgcaccggcttgcaaattgttgtagccgaacttatccgtgctgaaattgctgactgtggtataatatcccatgtacgtctctttctggagttcggctaatgccaggacgtcgaagaagtgctttttccagccttttttataagtcagcatcatatttccgaggagggactccattttctttgttcctttataagcctgcccgttcgcccaaacagaggtggggagatattgcgaattttcaactatattataggtataggcaccgaacagtaccaatttcaattctttcatcaaattgaaggtgaaacgggcgtgtgtactgatatgcgaagtagcgtcgtcatcgtccacctgcatccatgccaacgggtttgttatctgactggcggtagtgatgccgtcccacgagttagtaacgggatctttatggttaggatacgtcgggttaaaggttgccgccgaatagaaggttttctgatagtcaaccagattatgatttttcaggatagaaccgaacatccccagttcgcagtcgaagaagccatcgaacatcttttggttcatgttcatattggaagtgaaattcttcatatcttcattcaaaatcaccccctgacgatccataaaaccaagtgatacacggtagctcgacgtgctggagcctccatagaaagcgacgtgatgattctgttgcagacctgtctgttgtatttctttctggaagttagtattattacctttatctaaaatagagataccgcgttcggaagctacgctacggaactcgtctcccgacaacattttaagattcttgtagacagtagaaatgccgaaactaccgttgtaggctacctgcgtcctaccctgcattccttttttagtggtgacttcaatcacaccggaagcaccacgtgaaccgtattgtgccgtttcggaagcatctttcagaatcgtgaaactttcgatatctgtgggataaatggaggtcagcatactaaggtcgccaaacactccatcgacaataatcagaggatcgttaccactagtcagtgaagtggttccacgcaggcgcactgcatccagagctgcgaggccattcgtaccccgttgaatagtcaaacccggtaccctaccccgaatcgcttccaaaggattggttacctggtctttgttcatttgtttctccgtaattttctccacagaaccggagagggttttcagacttccggtagcatagcctaccgttatcaaggaatccaagtccagaggaatgacaggaatcttctgtgcaaatgtatttccgcacaaaactaccagaagaaagctaagaaaagttagtttaccgtgttgtcgtatcataactatcagtttttaaggtaataatacaaatataacaaaaaaagaaggaatctggttgagtagattccttcttttattgatattaatagccgcaatatgactcttttttcgagttttaccgagggatttgcttacttcactatgatttcatcagtaaatatccagccacccagttctttgccggcacgcgcctgataacgtacatagcgtcccttgacggttccttcccacgaaacatcggaaaacttgattgcttcttccttgttaacaacaaagtcctgatgcttcagttccgtaaaattgactccgtcatcggaaactgaaataaccacagacgcaggcaagaatacttcagctcccactacctgcatgaaagctgctgtgactgaatgaatagtggtctcgttttccatatcaacggttacatcgaggcggttcttcgagataaatccctgccatgcaccgtcaccgtaagtccagtcgccacggataccgtcggtcaaagtcacatcaccttgtgctgcataagaggagttgtaaggagcgttataaatcactttctttcccaatgccagatgcgtaaggggttgtaaagattccggccgacttccgatctcactcttcaaatcgaaagtgtgatagcctttcgcctgcaaatccgttaccgctttcagggcacgtgcatagaagtccggccatgacttacgttccggagccgaccaggcaacttccgccaatgccagcgtacgtggatatagcatatattccacgtgttcgggagtcgggacatattcagtaaagagattaacttgcgcaccatacacaagtttcgcttgttccgctgacaatgaagtagaaaccggattgtaagaatagacttttttcaatggcaagtatccaccaatcgcttccggctgagagtacggagcgtcctgataactatccagataacagtagccacccggcgtcatgatagcccggtgtccggaagttacagctgtaataccgccttcttctccccgccatgacattacagtcgcgttaggagccagtcctcctttcaatatctcgtcccagccgagcagacgtcgaccatgatcgttcaggaacttctcaatacgatgaatcagataactttgcagttcgtccacgtgagagagatgttcgtctttcattctcttttggcatttcgggcaagttttccacgctgccataccggcttcgtcacctcctatgtgaatgtattcggaagggaaaagcgccatgacctcggtcagcacattttccaaaaaggtgaacgtttcttcgtttccgatacagaagtccgcgttcttgtaaggctcacccgcgcaagagagttgcggataagctgccagcacttcttccgagtgggcaggcatttcaatctccggaataatcgtgatgaaatgctgacgagcatattctacgatttcgcgaatatcatcctgtgtatagtaacctccggaagctccaggctcgtcgaaacggaggtacttacgtccgccgttccaccacgtcttccaattggcgtcagtacgccaggctgcaaattctgtaagcaaaggatatttcttgatttcaattcgccagcctgccgcatctgtaaggtgcagatgcaggcggttgatcttatagaatgccaatgcgtctatctgtttcttcacaaattctttagaaaagaaatgacgggatacatccagcattaagccgcgataagcgaaacgaggactatcctgcacttcaacagaagcaatggaatagcctgttcccgaaggctgagataattgcaacagtgtctggattccgtagaacaatcccgctcccgatgttgcacggataaggattcgttccggagtgacggacagggtataactttcgggagaaggcaactgttcgctcttttcggttatcaacagagaaagtacgttctgcgtatcttttttctttcctttctttagatgaaccggtaatgcttgcagatagctttccagaagtcgagcttctccaccttgaatgtttgtataaagttttgttttctctgagagtaaaaaagagcccgtaccctgctctattttcagagggacagggattacggactgtgcatgaagaggatgtgccgcaaagcacatccccaatacccataagaaaagacaaactttagtgcatctatttcttatattcattaatctactgtgatttcatctacaaacaagaaagcaggatttcctttgcctccatgccattccggtattttactttcagacaaggcaaccacctttacatactgagttttcaccggagtgaatgacaatttatgttcgtagataccattcttatcactttgttccatagcagggtattcttcggaagctactttggtaaagttcttaccgtcgtctgatacttctacggaaaatcctcttgcatcaaacacccagtctcccttctctacgcaagtagaaatagcaacgctcgaaatctcggtaggttgctgaaggtcgatagtcatatccatatcgtttttatagaatgcaatccaacgaccggtcttatagttgccatttcctttcagtccgtctactagtgtagattcacctttaaacatatattgtttgttgaccggttgattagctacaatcggcttcatgctggacttactgaaattgatcttctctgaaatcacacgactgtttccggtaggacgaacagcgatagcggagaagtctgcattttccttgattttcaggacaccttcataaagcggagaagcggcagtaggttccgtaccgtccaatgtatagtgaataggggcattgtcaatggtagacaacgtgatgtccagtgtaccgtctgccgggttcggcgtatattcggctgttacgttaaacacatgttttgcataattgtatccttctgcatcataccacttaatcagttgcggcaaacgagacaggaagtcttcatagttcttcttgtcgggagtagaccactggatttcacacaatgcagcccaacgaggcaataccatatattgcgcatgagagaaagtaggaatatattcagtccagagattagcttgcacacccttaatatatttttgttcttccggagtaagggaagtcggcataggttcgtagctatatactctttcaagcggcagataaccaccaattccgagaggttcgttttccgtatctttcgtctgataatagtcgaaatacaaataggtattcggtgtcataatcacatcgtgtttctgtttggcagcttcgataccacctctttctccacgccatgacattacagtcgcgttaggagccagtccgccttcgagaatttcatcccaaccaataatctgacgtccgtggtcgttcaggaatttctcaatgtgattgattacgaaactctgcaaacgttcttccttactatgtttatcatccgattttaaccccaatgccttgatacgtgcctgacatttcgggcatttctcccagcgtactttcgggcattcgtcaccacccacatggatatattctgacgggaagatctcaatcaattcagcatatacgtcttcgaggaatttcaatacctgatcgtttccggcacaaagcacatcttcagatacaccccattgtctccaaacttcatacggaccgccagtacaacctaattcgggataagcggcaagagcagcctgcatatgtcccggaaggtcaatctcggggataaccgtgatataacgttcggcagcatacgctactatttccttagcctcttcctgcgtatagaaaccaccataaggtttgccgtcatattcaccggagttacgtccgataactgtttccgttctcttagaacctatttccgtcagtttcgggtatttcttgatttccagacgccaaccttggtcttcagtaatatgccaatggaaacgattcatattatgcaaagccatcatatcaatataagtcttcacttcatctacagtaaagaaatgacgactcgtatcaaaatgtgcgccacgataagcgaaacggggagcatcctttatctctactgcaggcaaagcaatctccgcacctattgcgacaggcaatgacttacgcaatgattgaattccgtaaaatactccggcctctgtaggagcagtgattgtaattccgtcaccggtaactttcaattggtaagattccggattttcggattctgtcccaagtgccaatacaattgcattctctccttctgttccggcttcgataacaaaatcttttccggtagctgttttcaagtagtctgccagaaatttcgcgttacgttgcatattctcattaccttccggatagagaatcttcacactactcttcagaatgaaggggtttcccgaggctgttacaatttcctgaggcatgggaataatctggtaatcagcttcttgctgagccgattgacaagaggcaaaaagccctgctaccgccagacatcccgttaattttaagagttgtttcataaactaaaaaattaggtgttaagttattaatagaattatttaattataggtctcacgaatatgcttcacagtcagaggcagttcctcccctttctttatttgaggagaagtaatgagaatcgttttacgttctccgggcagaagatcgaaaaagttgtcactaaaacgggcaccctgtaatggtacttcgataaagacgtcttttgccaaaacaggagaaagaagtgtcagttcgcattcgccatctgtctgcttcattttataggaaatagtcgtttcgggcaaaagtaggtctttggtctttgcaaagaaataaaccgtttcatctaccacatgtccggatttgtctttcaaggtaagcagcatgaagcagtggaggagttcttccgaaagcgggcgttttgtcgaagacagtaaggcgtcaagttttgtccgatatacacattgagaggtatttgcaggaaccgacaaagatttcaagagcatcggtttactgatcttttttccctcaaagtctatgactttcatttctaatgtcattttctccaacgtatcaaggcgatcggaaagaaggtagacacataagctgtcattccgctgaatagggttgatatgaataggagcaaaagcacgtttcgcctgataatgcaaagctttccagttaccataatagtcgatactcgaccatgaaacgacgggccagctatcgttcaactgccagtatagagtacccatgcaataaggacggttacgacggtgagcttccaagccatgacgcattccctggccttgcaaaaccagtccgacgtatacaaagtcctcaaatttctcaggtacgatatagtcacgttccatgtaagtacggatcaaagcattgccaatactactcttttggtgggcattcatcacttccgattcgatttgataatctccaggagctgcgaatgtagcaatagttttcatctcagggaaggattggaaaccaaattcgctcatgaaacgtggcaagtcggtatccaatgattcaaaaggtttctgtccgtaccaaacaccccaattatggctatcgcctattccccatgattcgggacgtccccagttggctagataaggggagctatggatataaaagcggtcagcatcgagttctttcaccttggcgggaagtagttcacggaagagtttgtcgtaaccggacatcatttcctgatagatttccggagtgtattttttctgatacccccaatatttcaaggcttccaatatctcattgttgccacaccacatagccagcgaagggtggttgcgaagacggcggatgttgtagcaagcttcctcctctacccgcttcaagaatgtagggtcagacggataaggggtacaagcgaacataaagtcctgccaaaccaagatgccgttttcatccgccaaatcatagaaacgatcgtcttcatacgttcctccaccccatatacggactacattcatgttggcctctttgatatcacggaacaatgtctgatagcgttcggtagtcacagagggcaatagagcgtcctgtggtatatagttggcacctttggcgaacataggaatgccattcacttcaaaatagaaagattctccgtccgcatctttctcgttcaccaaccggacggtacgtaaaccgatacggtgggattgctcggctaccactttaccgtcaaagacaacttgagcagagaaatcatacaaagccggtttgccccaaccattcggcatccagcgtaccggagacaggacttcggaagggatatggatagagttgagtccgggttgcaaagtgacagaacggctaattacagtttcttctcctttttcaaatgaataattaatccgtatttctgcttgaatcgattgaggaagtatattgtttatttccagttcattagatagttcggcagagtgttctgtcagcgacagttgcttgatatgataatcattaatggaagcggcgtcataaaaacggatttttaccggacgccaaataccactagttaccatacggattccccaatcccaaccgtaactgtaaggagctttacgggagaacacactcagatgtttctcatggtggtcattatccgccggatagttgaatccgttggaggcatattgaggaagagtttgccggataggtgaatggaaatatatatggagtaagttttcccctagacgaagttgtggctttacaggtaacgaataaccgacaaacatattatcggactttaacagtaaggaaccgttgagataaacatctgcataggtatcaagaccttcaaagatgagctgggcatcatcccgctccaattgttccattgtaacggtaaaagaagtgcggtattcccaatcttcgttttccacccattgaatcttctgttcattcattccataaaaaggagaaggaagtaatttgtggtgaataaggtcctgatgtactgtaccgggcacttctgccgttcgccatagttctgttcctgcttgagaaaattcccagcctgtgtgtagaagtacaacttctgaattgtcattactctgtgcatacgccatgctgcaacaacatagtagtccgcatgctatctgagccttttttcctgtcaaattcaatatcatagtgggggtattagatattaacggagtcaaagatattacttttttgtcaattttcccccattattcgaccgttatttttataatttccggagtacggacaccgggcttcaattctccattaatattataatatgttttatcccaccccactaacgcagctccggcacgcgctaccagcgatgtacgggcaacttcctgccagatgtccagattgatattatagaccaatatacggtcattaaacttataccattctaccggatgaaggaggtaatctttttcaggacaccgtagagccgctagaaatatgtctttgtttactccacctgtacataataccaagctatcatttaatgcaacggcagctcccccccctaaagatacaacctctccgtcacttcctttcggagtagctacaggcatccattgccgagatacggaagaataacagtaaccacttgtggaaagtgttgccggttttccttccgtagaaggagcaaatcctccccataaatagaaacggtagtcgtctcccctacgctggccggcacaaacggcttgtgtacgtgcatctccgggatattccggtaactcatgccagcctacagaaagattagttaaatcgagtcggaggaaggaattggatggctttccgtttctatttcctccggctatgaatagttgttccccaattagcgtcccacacatattatccagagcataaggtaaagccggtaatgtttcgatgacgacttttcctttcttcttatttttcccattcttttcgcttttctcatcccagcggattttataaacagaagttagtgcatcctgaccgtcagttcctcctatacagatgattccatccgaacaggatacagaaacgccataagcggcagaaacgggaagttctccaactttattccagacaaacactgtatctggattcatctctgctacataaatcccctgatagtatttcttttttcctcctttaccggcggggattccgggaaaattacaacctcctgccaacagcagtttcccattcagcattcctgcataacaggcagagactcctgatttaagtcctttctccgacttaggaaatccctccattctttgtaaatggagatcggcaacaaaagattcgggcgcttccgcacgaaaagttgacgcgggcaaacctgcctcattcaccaaatttgcacgtgtgaaaggttgccagccataacggatatatcgcggacgtttcacttgttcgctatatacttttatctgaccgtttattatttcggcaactgcgggataataaacgccgtctgtctcggcaacttcaaacgtacgcaaaggaccaccgtccgaactcttcaaccccttgccgtaatcaaaagtaacatatacgacatcttcacaaaaatcggcccgacaaaataaaggtccggaaggcaacacatcatgcattccataagttttattcaatgcccagcgagccaagcgttctccaaccggttttttatttctaggatgtacatccaacgaatcaccataatcacttgatactgccataccggtattcggaatttcagccatcattctacgctggctgtcacggaaccacggccacgaaggacgagctatactggaaagctgtacataatagaatggcaaatcctcattcttccagttcttacgccaactaccgactaagagtttaaagagcttctcatgagcttcgcaattatgagcgtttgattccccctgataccagatcacacctctgacgggatattgctccaacggccgaataccggactcgtataaataacaaggttcataagggtggcgctgaaacttctccttcgagagtttaacattcaatgcagctcttccacgtacccagtcctgtataaagtcattacgcgtccaatcttttaatatagccgggaattgatattccaacgtattccggtcaatccatgattcggtgggtgaaccgccgatagcattacagatcaaccccaccggaaccttcaagctatcccgcaacatctgaccgaaataataagcgattgcagagaaatgggcagcattggcaggagtacaaatttcccattcggtctccttataatattgaagatgattcaaggaatcgagaacggaagcgtcccattgcactgcgtccgtgcgccagcgcgctttcatgtcatacaaacgtaactgttcgtcggcagcttgaggaatgtcttttttgccggtaatagtctgccgtaacataaattccatattcgactgaccggagcataaccaaacctctcctatcaaaacatttgtatatttcaagattctatgaggggtagaaattgttagcgtataaggtcctcccgctttcaacggtgataatttcacggaccatttaccgtccggtgcagcctttgtaatccaccgctggcggtctatgcaaactgttacttgctctcctgcattggctctcccatgaaccttcaaaggagtatcgcgctgaagaatcatattatccgtataaagcggagataatttcaagcctccataatctccggtgatagccgagtaaactgttctcgccattatcgcagccccttcagcagcaggatgaacagcgtccggcaaaagataaggatatggataaagcggttcgtggaaatcgattaactgtaccccggcatagcgtgccaccgtttcaatagccgtttgtatctctccatgccaatcacgggttcccgacaaaaaacgggtatggcggtcggcaatcggagtcattcgtgcaatgataatccgtacagcgggattggcctcacggaatgtatcaatcagcttcaaataatctttcacaaaaaaatcacggtagttaggccaattgcgagggtcggtatcattgatacccaaatgaatgacaacaatatctcctgcaaaatccaatgctttccgatattcttcctgtcgggtataagggcgatgtccctgattaagcagggtagcgccaggtttcccgaagttctcgacttcataacgttctcccagcagcttttgcaacttcacaggataagattgtgttgcacggtcagataatcctgtaccataggtaatactgtttcctacacatgcaacctttatccgttgctgggcagacaacacccaacaaacgaacagacagacgaataatagtaaaatctttttcatttatttcttcccaatgtaaggtttcacaatctctacccatttcaagtaacctttccccagaagatgcaaaccatcatttgtataggtagtgttcatctttccggtttgtttgtctataaaatgggagtacaaatctatataggtcgctccttctttttctgccaagccgactaaccctttattgatttcagggataacctgccaacgggaagtatgtcccttgaacatattgtaatggtcggtgaccggaagaacactttgcagatatagctttgttttaggcgaatctgcctttatcttcctgacaatcatctcaatacgggatacaatagtatcggcgggagttcccctactcacatcattaataccaatcaaaagaaatattttagcgggctttcccttcaggatagcatcaagacggtcatatactcccatacaaatgtcgccgctgattccacggtttttgacatgtttgttcttgaacagttccgcccattcggcaccgtttgtgatactgtttcccagaaaaataatgtcactggaagtaacaggcagttcttcaaacaatgtagcacgctggtagtaaaacgtagaatatttgcgttcttgtgcgcggcataacaaagacagggtcaatatgaccactaaaaaaaagatctttttcatgactattctttttatttactcattagcatatccgtttttcattatagcatatctgagtttcattataacatattcaaatctgctcatagcatatttataaatagttctctctctataatcgatatgtcactctagtgttttatttggtgagtaaatgagtccttctaccgctttctgtccgtcaagagtaacaaagacagtagtaaacatccattttactagccggacttccgggctaacaaacttccctaccggtaatttcaaaagtactttattccagcctttttgcagatgaacttccaaaggcgggcgtgccacacaattttcgttgcccaaagctatttcattgcttttggtgcggtgagtagctgtccagacaggcggtaatatttcctgttcatttatccagatacggctttccttataatcccattttcccggcagaggaggaagatcggcttcggagcgtccgtaattctgaaattcagcccacaaaccaacgttttgttctttcggcgaatagacataggtgtaggcgtaggccgtatggttttctttcggttctttataaaatccgggaataagcgtcccccacacgtggcgtaaatagattccggcaccaatagcaggacgcacattgtatgtttttcctccatagctgtaactatcctgcaaagtttcttccggaggaaaagcctttgccagatttccttcgttcgggaaagcatctgtaatattccatttcacatttgtctggcggacatacgcaaacggataaccgtcaaaagtatgttctttatgccacaacaaacgacgttcaaaatcggcaaaacttctgaatagttccgaatgctcgtcggttggaagtattgttccgttcttatcgaaatattccgtcccaccacctttccaggcacgttccgccatagccagcatattaggatagaaattattttcgataatcatcccccactcggtactgactaacctgtcattccagatagccaggattgtccctgccaaatcttcgcttccttgttccttattataaatacgactattgtacaatgctatgatatcaccaaaggtgtcaaaatgattcagataatgaaaacgtgagtcaatggcgggaatccctttctgcgcctttccacgataactccaaagttgagtcatgtcaatctccccgggtttgtagtgccaacccggattccatgaaattactttcttacctttggaacgtacataggacaccatttccggcacaaaacggggattggtaaactgcacttcatccgtaccgatatgcaaataaggcacatcaaacgtttcacagacttcatccatcaacaatttcaaaattttcatcccttcaggactttgcatatcatggcggaaagtacgtataaatgcagcgctatgtccgggcatatctatttcgggaatcagcgtcatgtgatgtgctttacagaatgcaaccaactccttggcttcttccaacgtataatatttgccgggcatgcgggtggtattcgcactatcgttcagcatcggaaaaatcttactttccagacgccaggattgattctcggtcaaatgccagtgaaaaacattgattttgaatttggcaagcgcggcgatttcacgcttaagttcatccagtgaaatgtagcttcttccaacatcctgcataaatccgcgaacccggaaagcaggccagtcgatgatctcagctccttgaatatgcgtttttgaattccttttttctgccagctgccttaaagtttgcatagcccaataaacaccgcgttcggttacagcctcaacaattatccgcttctttgtgatgctcagtcggtaggcttcatcctggttcatcggtatttcggggagggtcggcagtaatttaacttcaatagtaccggttgccttgggggagacggttcctcccatttcggagataagagtttcccactcctgttgaagcacaggagtggaaagctgtaccttattcacctgaaagtttaaatgagagggggtaaacttttgcggctgggggagcaggtgataatcacctgcttttaccactgaaattgtgcataagttaattataatatatataaataatatgagtctgtttttcatgattacaggtcgtatgataattcctattgtattatatctctcagccggattgcctgaaaagtcatatgagcgacactgctttcatataatatgccgactgtctctttatcaatcattgtcaaacaagaatatccccaaccgtcaccttcatccagcatcacttgatgttcgggtagccaggtgatacctccatccagactggccttgatcgtgatatgatgacgaccttttaccgtattcggattggagaataaaagaatatccttatttaatgtgttgtctgccgctttcacgctgattaaacttgccatacacaccggttcctgtaaagctttacgggaagaaggatgttctgtccaagtcttaccgagatccttggtagtagcgacagcacgactgcctccacggttatctctcatatttaacatcagtacgccaggctccacttccgctacctgagcttctgttgtattggtgcgcgcatagttatggattttccatgtttcgccacggtctttgctatacataattcccgcattcggaacacgggtagaatcgataaactgaatcgggaataccaatgtgccgtcttgcatggtgatacctcgtcccggtccttgcaaaaggaaataccaggatggatctttcacctgatctgttatattaataggctccgaccacgttttaccatcgtccgtactctttgacaataccaactgggccgtatgattcatatccattcccggataagaactccaccaagcacgctgattacccattccatgtgtccaagccgccaccacccatgttgtgttggtcttggtatccactaagatcgaagggtcgccaacaccgttctgcgcagcaggcaaaccgcctgtttcaccaaaagctaaaggtaaacgcatcttctcccatgttttaccaccgtctacactacggctcaaaccgacgtccacatgttcctgcaaatcaacactgctattataacgtacatcataaactcccagcaatgttcctttattagtagttgccaatcccggaatacggaaggcagccgaaccatcgtcaccagcatggcgtacccctactcctaccctatgagctatattctccggtgaaaccgtatgcataagtgcttctttattatcaaccttaacagtaacaatcttagctgacactttatccagcaaagaggcgcccggtttcatttgcagactgatccagaaataattgattccgggaaaaagtttctgattagcattcagtatcactttccgcccgggattatttacctgtgatttattaatcgaataagaaggattcgcagccaatgtcttccccggcgtatggctggaaatataagatacgggagtaaagaatttcttaccatagttttgtctggcctccgtaccactataatataacttaacggactgtatatccgccatattcacatctttgccaaaattcaaaactacttcatccaaactacgactctcttttgcattcaaacgcaacataaacaacacgttatcctgtcgttcaatcaaaattggaatctgagtttcacgcacaaatacagtatccgatgcaacagcctgcaaagtcccacagacagataaaaaaaggatagataataataaaagtaggtttcttttcatggtattattaattgtttgggcacaaagatataaatttatcatattaccagcaaataattaaatattttattatatacaagaatattaataaactagcattagtgtgccatttctttctttaaaaggaagaaaaagataaaaagcgagatagataaattagtccctatcccgctttttatcacaatgtactaacttttattccggctgctttttataagtgttatatcccggagtttgttccagtaatggattgatattcatcgtgctaatatccaatggccataaaagtttatgcttttcactcgtactaatcaaaggagaagtagacggataattggctgctgccgaaaacgccaacgaattatgagaagcatcctgcatacgtacaacatcaaaccaacgtttaccttcccagacaaattccttatcgcgttcgtgcaatatagccaattcgtttgcttcaaaactaccgtcagcgtattcgtgcccggcatagtcgtcgccataagcacgcttacgtacatcattaacataagtactgcatgattcacctaatccgtttgccacttcggccatcataagcaaagcgtccgcatagcgatagataataatatccgtatcataaatacgattgttattagagttaattgaacctatgccttttttcataacgcagccaaaacttgcaggatctttatcttcttgagtataatattccaaaaaggttacatcacgacgagtatctttttcatcataggcagaccagaaatcataggtatattcatgcctgaatacaccgccagtccctttcagattcaaagtgtcggtttctatccgcttgctgtcacgtccatacacctgtccgataaatactgcatcctgatataaaaattgcccagcccagttggttgcttcgccgtcggcaaagtgtaatgtgaaaataatctctttattattacgattggaagtactgaaaacattttcaaaatcggacagtaattcaaacttacctataatctgattcaaagctgcttgagcaaccttcaaatcagttgttccggtagcagtatgtccggtaatggtcactttagcagcccacatatatatttccgctttcaacatcagggtagcagctttggaccatattgttttatcgtaactatttgtcactgtaatatctgcataattattctctgatttttgaatatcaccttttataaattcaagcgttgcttccgctgtcgcacgttccacataaaatttgtccgcagtcaccttgccattcaagagttcaacttcagtgacaataggcactcccccatacgtcttataaagcatgaaataatataatgccctcaatccatacgcttgagccaaatagtgttttctgtttgtatcatccaggaaactgcattcattctctacttgctgaataaaatgattgacttgcatgattggagaataaagaccgtaccaattactaatacccggcctgtcttgatcaattacattggaacggagattagcatagttcaaactagtattttcagatgaagttcctacacgttgtgttccaccacgaacttctcctagaacatagaacatatcataataacttctcagttgagaatgcatacctgtcatatatccatcaacttgagcttcattattccaatagtttccacttccgaaataatcctcgggagtcaaatccaaagcatcgcatgatgtatagaggacagaggatacaaataaagaaatgatgtatattatttttttcataatctgtcttttttatatgttagaaagaaacgttgataccaaaaattacagtgcgaggcaatggatatccaccgttgttatccgccttttcaggtgagaacaagtgcttcgcttctgtcagataacctaagttttgtcctgtcacagataattccacgttactcaatttagctttttgcacccatatcgacggtaaccgataagttagcgacagttcacgaagtgccagataattaccattatacacaaacatggaagaactacggcaatagtttctctttcccaactgatccgcccaaacatatgtaggatatttagcgttcggattgtccggtgtccaagtatccttagtttcctggatagtattatatgtaccttgcgcgcaagccataatccacattgatttccagtctaccgctttgaaccctaaagcatagtcgaaacgcgccgataacgtcaagtctttccagctcaccgtagtattgaaaccgcctgtccacttcggtaccgtatttccgacctttaccatatcataattatcaatcacgccgtccccattgacatctttccattttacgtcacctggctgaataggtagtgcgttttctttttggctgtcggacaatttattataaccttctgcccctccatataaaggtctgccggtcgatccattattaccggacgtaatatcaatcaaaccagccggtatctcatcctgtgatttatagataccatcagcgataaacatatacaagtcacccggacgttgtccttcctgatagcctcctacccacattttagcgtcaccatagccggtatatacctgatatgcatcttgtcgattacgttccagcccgttatccggcaacgctacgaccttatttttgttcagtgctccattccagttcagattccatttccagtctttccggtcaataatacggaaagccagttcaaactcaaatccttgattctggaacttaccgttattggaaaccacagaacctactccagacgtggaaggtacggtgatattagcatatttatcactagtcagacgattataataggtcaaattagcattaatacgattttcgagaaagcctaagtcaagaccgatttcaaaagttctggatttctcccacatcagataaggattaggaatacttcccaaaagaaatcccgtagcgccattgtaagtattactaccgtatgacccctgtacggtataattgcctacaaagttcttgttgacattaccgttcagaccgaaacttgcacgtaatttaccaaatgaaagtatatcgcttgtgtttgccataaatttctctttgctgaaaacccacccggtcgaaacacccggaaatactccccaacggttttcttttgccagtttagaataaccgtcttttctaagtaccagtgacaagagatattttgattgataatcataatttacacgtccgaagaaagacatgatacgttgacgtgaatgccaagagtcaatagagcgttttccctcttcttttgacgtatactgtaaatccataaagtcgtcggtcggggctcccgaaccggatgcattgaaacctttattataagaatcataatattcgaaaccagccatcgcatccagataatgatctttgtttatctgataattataatttaatacagcattataggtctgatccagtgtgcggtcataataagcagaggtgctgcgtgaagtaaccttatttcccggagaacttaaataatccttattaaagctttcgtccttttcttcctgataataccagattgcaccaagctttaacgaaagtcctttcatgaagtttacagtgaaagattgattcattgtaaacttatcagtgttctgatcccggacaaacttatcaaaattatactgctgattaccatccccggagttagggcctaacagcatctctccatctgcattgtaaccgcggaaagtaggaggcaatgacaaacaacgagaaaaataattagcctctgctgtctgagttgcaggcaacccgttccaagtagcgtccgcaaaattaaaactggaactggaagttaaccattctttcagcttataatcagcattgaaggtaaaggttatacgcttataccagttgccgtatgccgtaccgtcactcttattataacctaacccggcatagtagttccctttttcatttccgccacttacacttaaattataatcctgtgaaaatgctggagtttggacgttgaaatctgcgatgtctgtgtttttataaataagtttatccccatagatagggtcgatcattgtttgccaaccctgatccaacaaaaaagccagattatcagtatatttcattgtactccaaatagcagaactcgttttgtttccatccagaggggtcaccccgtcactcgcaaaataagcattacctgtaccgtaaggagtagcactagtcaatgaactaagtgaagaccatgccttcacagcgcttccgtccggatgtttcatatctcccatataagcattcttatatcccatacgcatccaataaatataatctccggcatcaagaaactcataggaatttttgaaatagtttaacccgaactttgctttcaggttcacttctgctcttccgctttttccgcgcttggttgtaacaaggattacaccatcattggcacgtgcaccatagattgcagtagcaccggcatctttcaatacttccattgattcaatatcatccggattgatatcactcaaagaagaacgtacctgtccatcaatcagaatcagaggagagccagaaccatcaaagttagtacctccacgaaggaccagcgtcggtgtactgcccggattaccggaagtctggctaacggacaaacctgcaacagctccggataatgcctgaccgggatttgaatacaatccctgcttcaatgtttcttcttttaccttggaaattgagttggtaactttagtacgcaactgtttaccgccataaccggttactaccacttcttccagcatctcagaatcttctttcatctgaatccggaaagaagtctttcctttaagatcaattgtttgtacttgatatccgatatacgaaactctgatttttccgtccggattcatgtttaatacaaatttaccatcgatgtcagtaatggtaccatttgttgtacccacttcgacaacactcgctccgatgattggttcaccagcagcatcgcttaccacaccggtaattgtttttgtctgtgccatagcccctatggagcagaaaagacacaacataagcaaaaggatgtcttttttcattagtattacttttagttaataattgaaataattttagatacttatctaagtccaattagaactaatcttccggtaatacctcatctccctatgtcagattcctctttagaattttaatcggagcaaaaacatattcgcaaaatcgacctgttttctacctatttaagatataactcttcccttttattcatgactttaataatgcatatttttatatttaatagcatatataagaaaataatttattaaatactttgcagatattaataatataaatatatttgcagcgatttaagatatacatatcggtgatttatatctaaatcctctataagatagaagaaaatatgaataaataactcaactaagttctaattgaacttatgcgttcacttgtaaccactatctattcattcaccaataatacttataaaaacaggcatttatttattgacaacaccacacttattcaattctctagggggtgttgtagaaccaaaatcaattaccggtataatgacaaattgcataagcaaaacagagtcatctatataagtgtaacagcaacaggtatcacaaatggtacggattctttaagtccccgacaattattgagacccaggacgattacttcaaacgtttgctcatgtttgttaattacaactccaataaatttgttcagacctccttcaccatacctatatatcacatcgttttgagaaatctaaagcagtgctttaggaggtgtaaagcatagcttttgcctacttaaagcagtgctttataaaatcctagaagtttgtttcaactacaagaaggaaaaatatacgcgatgagtataatttatgctataagcatattcagatttactataatgaaataaagacttgctataatgaaaaatggaagtgaactcctcgcaccccatcctttatccactaacacagacaaacagggaaaagtgaagaaatgaatgtttttcaaaaaaagaaaaccttaccagtgatgaatccaaaataaggggttgaattcagcactggcagtttcttgtcaaattctgcgtaactgacaacacctgaacatcatctgcgttacgcttcatatatacttgcagacttttatcttgccggcttctctacgtgctttactaaataaaagtatctttaactatcaacagtgatatctcaaagaagctctttacaaagcatataaccacgaatcatcatacgaggtatatggaaaggtcctttaaaaagattccccttagcgggttgggccacagtaccgtcgcgatgaagataaccataccattccccatattccttatccgggaaatgagcataagcccaatcactcacctgttgatgcatctgaagatatttttcatctccggtagcctgataagcatataaagtggcaataatagcttctgtttgcggccaccagaatttcatatcctgagaatagtcctgaacaggaagattccgacagtcacggaaattgataattcctccgaattccttgtcccatccccactcccaagaccaatcaagaatctgaagagccaactgaagtaagtccttatcccaattacgatatttagcttcttccatgataaaccacgcagtttcaatacagtgccccgggtttataacgcgcccgttacaagtatctatgaattcaccgtcaggtcccaccatttcaagcaaagctttaaactccggatgaataaaatatttacgtaacgctgcaatcgaagtatctatctgctctgtcaacgacggatcatcaataaccatacggatacgagaagccgtgttaatcaagatcattgttatagaatgacctcttgaaggcagagtaggcaaatattttggctcaagaaatcccggagtattcaggaaatgcaaggtacgtttaaatatatccaaagcttttttcgcatattctttttcacctgttgctaatgcatactcagccattgctattgcagcaaaaccttcagaaaacacataacggcgtttacgcaagggctttccgtcttctgtaacttcaaaaaacatatgtccgtccgtatcaaaacaatgtgcttcgataaaatcaatacaactttttgaggctgccagccattgaggattcttttctatattattatatgcatatgcagctataaatccaaaacgtccctgaaaccaaaccgacttggtagtatccatcaaactaccgtcacgattaacgcatgtatacacccctccatgttctctatctaacccatacttcatccaaaacggcataatattatttattatatcgtctttatatgatatagcccacttactcaaatattctgttgtattcatgctatgcgtttttaaaatttattgcatcggtcaaaaaaatgaatagcttcaagttccgctttcatctgcgcttcttcctcatctgtcatattctgaaacggagtacggttcttgcccaaatcaagccctatcaacttcatgatacgttttccgccgacaatattcccacggaaatgacaaatcacgtttattacttcttgtgagaagttttggcgttcgcgagcagtttctatatcacctgcctcccaagcctcaataataccgaccaattctttaccgttataattagttgttcctccaatgccaccttgagcgcctcccatagccagacaaggaagaattgtctcatcctgtccatgcagcatatcgaattttccatttttatataaacgacattggttatattcatacatactctcaaaagtatatttaatacctgcaaaattgggaacacgaccgtctaccgcttccaatagcttaaccattggtaaaaaagcaccattgaacgccggaatatgataataatagaaaggcagttcgggtgccccagctgctatttcttcgatatattttaccagttcctcaatacgaccaatcttcggaaaaggaggagccatagcaccaatcccccatgcgcctattttttgtgcatgctctgccaacatacggctagcctttacacagcagctaccaacatgcactataaccttaaaaccctcaggagcaacagaaacccaacgttcggccaatcgcatacgttcttcttctgtcaacatatagccttcaccggaagaaccattgataaacactccttgcagtccattctttaccagcatcttagcatatgcttcaattggttctaaattcacctcaccattctcataaaaaggagtaaacggtgcgtcaataagtcctttaattcgttccattattttattttttataaagttatatatactcttaatctaccatattatctgtcttcggccttaagaaatagatttgaagtaccaatgccacagccactacaatgctcaacattgcaaatccctgtcccaagcttcctccatccgtccatttccctaacacttctgtcacagcagctccggcaaacacgccggtcatattcataataccataagccgttgcacgatgtttcgccgatacaaactgacataaaataggcatattattagcgtcaaatattccaaagccaattccgaagagtaagcctgcaccaatcacgctaacaaagctatgtccaaaacccagcagaagtaaagccggtatagtcattcccaaaccgatagctccggtatagacccgtccacgaatatttttttgtacccaacggtctgacaagatgccacctaaaataacgccgataaaagaagaaactgcaatcgttatggtagatatcgggccggcttcggacatcggaatattcaaactatctgcaaataaggtcggaagccaattctttgttgcccaccccggaagactgggagcagcaaaatagaaaagaataatccaaaatgcccagttagtaaacagtaaggaaagcccacttattatagaaggtttcttttctccaggaacattatctattttcttgctagaaacattatgaataggattttctttcaaaaataatatgagtaccaaagaatagacaatccccacgataccaaaccaatgaaaagtagcctgccaggagaaagccgcagcagccgtagctccaaaaccaccaatagcctgccctacatataaaccggtcatgtgtactcccactgccaaagaacgtgacttcccttcgtgccagtcagcaattaacgacaaagccgaaggaatatacaatgcttcactgactcccattatagcacgcagccaataaagttcatgaaaatcatgggcataccccatcaagaaagtgacagcggaccaaacaaaaagactaccgacaactagccacttacgatttaccctatccgctataatcccggcaacgggactcataaaaccatagatccacaaaaatatagccattaaagccccaaaagcttctgctttattcagttctacaatatctactttcatagcttcttgcatagtagaaagcatttggcggtccatataattaagaagtgccactatccacaataaaccgactactacccaaggataaatacttttgtttttcatataaagcaatttttatgtttcactcgcattaaattattgcaaacataatactatttttattataagccaaatatttaattaaatattttattatatattcgaggattactaaatggactagagtctataacactttatgcatgaaaaaggtagtgccttctgctatggacgacactaccttttccatataaaaacaacaataattcagagcttcactttggctatcagtttacgtattttaccactaccaataaccggagcatgaggatcttccggatatacaatcacaaactgccccggaagcaaactaacataggtagtaggacgatctgaatacagagcacaatcttcttcttttgaatatgccttagtctcgttttgcaaatcttctaaagctttccaaccaatcatttcctcaccctccaacaagatatgtacatcaatatagtcatgatgcaattctaaaacctgctgatcagaagttacgcactccggattcacattattaataaatagatgatcaccatcaacctcaatacgccccaaatcggcatgaagcaaatcatgtgttttcacatagtcaaacaaagacttaaacaaagggtgaagtccttcaatccgctgactattttgcagattagatacaatcatatttttcctttcatttataattaaacaataatcgcacaaatataagtcttatatttaatattcggtttattattaataaaaatatttattatattaaacctgacactcaaaagccctttattattatttccgacgaaaaaatatcagaaattgagaatataataaattcaaagacaagaaatctccattaataaataaatttattatctttgcgagaaagaataaagaagaactaagatgaaacaacatttactgaaagaaatagaagtagggactaaaaacgctcttcttaagaagaagattatcacacattatatatataatggtagttcaactattacggatttagcaaaggagctagatcttagtgtcccaactgtcacaaaattcattagtgaaatgtgtgaggaggggtatataaatgattacggcaaactggaaacgagtggagggcgctatcctagcttatacggcctaaatcccgaatcaggatacttcattggagtagatatcaagaaatttgcaattaacataggcctgatcaactttaaaggtgatatggtagagttaaagatgaatatccctttcaaatcagaaaatacgtcggaagcacttgaagaattatgtaaacttatcttgcaatttataaagaaagtagatattgataatgataaaatattaaatatcaatataaatgtttccggcagagtcaatccggaatccggatatagtttcagccagttcaatttcgaagaaagaccgctggcggaggtgttgactgaaaaaatcggatttcgagtaacaattgacaatgatacacgcgccatgacatacggagaatatatgaaagggtgcgtaaaaggagaaaaagatattatttttgtaaatgtcagctgggggctgggtatcggcattattattgacgggaaaatatataccggcaaatcgggattttccggagaattcgggcacacaaatgttttcgataatgaaatcatctgccattgtgggaaaaaaggttgtctggagactgaagcatcaggctctgctcttcatcgaatattaatagaacgtatccagaacggagaaagttcaattttatccaacaggattttgtcaaaagacaatgttttgactttagatgaaattatcgcttctgtaaataaagaagatctgctttgtattgaaatcgtagaagaaataggccaaaaactaggaaaacagattgccggattaattaatatctttaatccggaactagttataataggcggaaccttatcactgacaggcgactatattacccagcctatcaaaacagcagtacgtaaatactcgctcaacctggtaaataaggattctgctattatgacctccaaattaaaagacaaagccggtattgtcggagcctgtatgctggcacgcagtagaatgtttgaaagttaaattattgtttcaagctctacaataaaggctaatctgagagatttaaaatttaaggctaaaaaattgtcggattctttttgttttctcaaataaagctgtaattttgcacgccgtaaacgagagacaaaccgccgctatagctcagttggtagagcaacgcattcgtaacgcgtaggtcgccagttcaagtctggctagcggctcttgataataaagcgttaactatcatcatagttaacgcttttttcataatattgaactgcatctgatgaaacgaaatcaaaacaggaaattattcaaaaagaaatcacgttctaattataaattaggatgtattatcactattgttatacttatacctgttctttatggtgtctatttgtattgccaacagtttaatacccaaacgcaaaaaagcaacgaaccacaagttaatacatcttctcaaattccttccggcagaaatttggagatccctgtctcattagctcccaaacaagagcaaatcattcgacatacaggatataccgtttcttataataaagatttaaaacttccgaattgggtatcctatgaacttacccgacaagaaaccaaaggaaaagaaaaaagaagtaaccgtttcattgccgatccattagcaatagggactattgcaacaaatgcggattatacacgttcaggatatgataaaggacacatggcaccggctgcagatatgaaatggagtccgaaagcgatgaaagagtcgttctattttagcaatatgtgcccacaacatccgcaattaaatagaagaggctggaaaaatctggaagaaaagatccgggactgggctattgcagacagcgctgtcatcgttatttgcggacctatcatagaaagagaatcgaaaacaatcggaaaaaataaagttgcagtaccccaacagtttttcaaagtagtcctctctccttttgtcaaacccatgcgagccattggtttcttattcaataatgaacaagcaacagatcctcttcactcatatgtagttaccatagacagtatcgaacgacttacacacatggatttctttgcaactctacctgatgaaattgaaaacaaaatagaagccgaagccaattatcaccagtggccgaattaactatctgtttggtaaacagcaagtaacccatatatcttttcttattagttccacatgtggcactaataagaaattgcaattcaaccaaaacaatctgccgatccggctctttaaatataaagaaaaactaaataaattctattccttttcagcgattcatcacagaaagaaatcactcctatccaaattcttcctatctttggcacagcaaaaaaataacgtctcataagatgaagaaaagaaagattttattgacaattctggtcggagccattttcctatgcgccattgcaggaggcactgtttattactatctgtttgctcctcagttccacccctccagaaccgtgtatatttatgtagatcgggacgacacggccgactccatatttaataaaataaaacgttcaggacatataaagaacttcaccggcttctattggatgtctaaatacaagaatttcaatcagaatatacataccggacgctatgctattcgcccgaatgacaatgtataccatgtgtatagccgtttctccagaggctatcaagagcctatgaatctcactattggaagtgtacggactatagaccgccttgcacggagtataggtaaacaacttatgatagattctatcgaaatagctcgtcaactattcgactctacctttcagtccaagttgggatatgacagtaaaacgattccatgtctttttattccggaaacttaccaggtatattgggatatgagcgtagacgatttttttcagcgcatgcaaaaagagcatgaacgcttctggaacaacgaacggctagctcgggctacggcaatcggaatgactccggaagaagtctgcacactcgcttcgatcgtagaagaagagaccaataataatgaagaaaaaccgttggtagcaggtctctatatcaaccgtttacaaaaagatatgcctctacaggcagatcctaccataaaattcgccttgcaagatttcgccttaagacgtatcactaacgagaatcttaaagtaaattcaccgtataatacttatacaaataccggattaccccccggtcccatccgcattcctactaaaaaaggaatagacagcgtattaaactatacaaaacataactatatatatatgtgcgcgaaagaagatttctcaggaactcataattttgcctccaattatgccgaccacatggcaaatgcaagaaaatactggaaagcactgaatgaaagaaagattttcaagtaattctgtgataaaacgaactgaaaaggctatctttgcgcgatataataacaaactgtgatcaacactaataaaagaaatatatgagcaagcaactcttacttggcgacgaagccattgcacaagctgcactggatgccggactttcaggtgtttacgcctaccccggtactccttcaactgagattacggaatatattcaaatggcccctataacgaccgaacagaatatacacaaccgttggtgtaccaatgaaaaaacagctatggaagctgcgttgggtatgtctttcgttggtaaacgggcattagtttgtatgaagcacgtaggtatgaacgtagctgccgactgttttgtcaactctgctattacaggcgtgaaaggcggactgattgtagtagcagccgacgacccaagcatgcattcttctcagaacgaacaagatagccgtttttatggggacttctcccttataccgatgtatgagcccagcaaccagcaggaagcatacgatatggtatatgacggatttgaattttcagagaaactaggcgaaccggttttaatgcgtatggtaacccgcttggcgcactctcgctccggagtagaacgcaaagaacaaaaaccacagaacggtatatctttcagtgacgatccccgtcaatttatcttattaccgggaaacgcacgcaaacgttataaagttctgctcgcacgccaggatgaattcatcaaagcttccgaagaatcaccttacaataaatacacagacggccctaacaagaaattaggaatcatcgcctgtggcatcggttacaattacttaatggagaattatcctgaaggctgtgagtaccctgtacttaaaattggtcagtacccattacctaaaaaacaaatccttcagttggctgaatcttgcgacgagattcttgttctggaagacggacagccgtttgtagaaaaacagttgaaaggttatctgggtattggaattaaagtaaaaggacgcttggacggcacattgtctcaggacggagaactgaatccagactccgtagcacgtgcagtaggaaaagaaaataaatcagaattcggcattccttctgttgtagaaatgcgcccgcccgcactttgcgaaggttgcggacatcgcgatatgtacatcacattaaccgaagttctcaaagaagaatacccgtctcacaaagtattcagcgatatcggctgctatacattaggggctaatgcaccattcaatgcgattaattcatgtgtagacatgggggcatccattactatggcgaaaggtgctgccgacggaggactctatccggctgtagctgtaatcggagactctacattcactcattcaggaatgacgggattattggactgcgtgaatgaaaatgccaatgtcacgattgtcatctctgacaatgaaacaaccgctatgacaggcggccaggattccgccggaaccggacgtatcgaagcgatatgtgcaggtctcggagtagatccggctcatatccgtgtagtggttccattgaaaaagaattatgaagaaatgaaacgtatcatacgtgaagaaatcgaatatcgtggtgtatccgtcattattccacgtagagagtgtatccagacattagcacgcaaaaaaagaagtaaataagccatgaaaaaagatattatattatcaggagtaggtggacagggtattctgtctatcgccacagtaatcggtaaggccgccttaaaagagggtctgtacatgaaacaggcagaagtacacggaatgagtcagcgcggtggagatgttcaatccaatctccgtattagcgaccaaccgattgcttcggatttaattccttccggaaaatgtgatctcatcatttcactggagccaatggaagggttgcgttatctcccctatctcagccccgaaggctggttggttaccaatgaaactccgtttgtcaacattcccaattatccggaggaagataaagtaatggcagaaatcaacaaactgccacataagattgtgttgaacgttgacaaagtagccaaagaagtaggttccgcccgcgttgccaacattgtcttactgggagcaacaattccattcctcggcattgattacgagaaagtgcaagacagcattcgtgaaatctttctgcgcaaaggagaagcaattgtagaaatgaatcttaaagcattggctgccggcaaggaaattgcagaaaaactaatgtaataattgtcactaccatgaatacacagtactgggaagaagaaatagaaaccatgagccgcgagaagttgcaggaactgcaacttcaacggctcaagaaaacaatcaacatagccgctaacgcaccttattataaggaagtttttagcaagcataacattactgctgacaatatacagtccttggatgatatccgtaaaattccttttactacaaaggcagatatgcgcgctaactatccttttgggttagtagccggtgatatgcagaatgacggtgtacgtatccactcttccagtggtacaaccggaaatccaaccgtcattgttcattcacagcacgatcttgattcgtgggctaatttggtagcccgctgtctatataccgtaggaattcgtaaaacagatgtcttccaaaacagttcaggatatggtatgttcacaggcggactaggtttccaatatggcgccgaacgactcggatgtctaacagtccctgcggcagccggaaatagcaaacgccagatcaagttcatcaacgacttcaagactactgccctgcatgcaatccccagctatgcaatccgcttggctgaagtctttcaagaagaaggactcgaccccaagggaacaacattgaaaacactcgttatcggcgccgaaccccacactgatgaacagcgtcgtaaaatagaacgaatgttaggtgtgaaagcatacaacagtttcggcatgacagagatgaacggtcccggtgtcgctttcgaatgccaggaacaaaacggaatgcacttttgggaagattgctacctggtagaaatcattgaccccgaaacctgcgagcctgtccctgaaggagaaatcggcgaactggtacttacaacccttgatcgtgagatgatgccgttaattcgctatcgcacacgggatttaacgcggattcttcccggcaagtgtccgtgcggccgtacacacattcgtatcgaccgtatcaaaggacgtagtgacgatatgtttatcattaagggagttaatatcttcccgatgcaagtcgagaaaattctggtacggttccccgaattaggtagcaattatctgattacgctcgaaaccgtaaacaatcaggatgaaatgattgtcgaagttgaactaagtgatctttcgacagataactatatagaactggaaaaaatccgcaaggatattacccgtcagttgaaagacgaaatactagtgacgcccaaagtgaaactagtgaaaaagggctcccttccgcaaagtgaaggaaaagccgtccgggtgaaagacttaagagacaataagtaactatttaaactgtatatgtgctaatataccactaccgctttctttatcatgcggaatggaatattagcacattattaattaacatcatatatagtatgcaattacttaaaaaaagaatcctgcaagacggaaaatgctacgaaggaggtatccttaaagtagacggtttcatcaatcatcaaatggaccccgtcctgatgaaatcaatcggggttgagtttgtccgccgttttgcagctacaaacgtaaataaaatcatgacaattgaagccagcggtatcgccccggctattatgacaggttatctaatggacttgccagtcgtgtttgccaagaagaaatcacccaaaacaatccagaatgcattaagcacaattgtacattcattcactaaagaccgtgattatgaagtcgttatcagttctgattttctcactcccgatgacaatgttctcttcgtagatgacttcctcgcatacgggaacgctgcattgggtattctcgacctcatcaaacaatccggagcaaatctagtaggaatgggctttattatcgaaaaagcctttcaaaacggccgtaaagtactggaagaacaaggcgttagagtagaaagcctggctatcatcgaggacttgtcaaactgttgcattaaaatcaaagacgaatagatttatcagggttgaaatattgccctttgtttctcgttcttttcccatattgcaccgcttgctgagggcaaacgtgataacacgccaagcaagaggtgcaattctttccccaaacaggtctcccctcccgaagtttcacattatctaccggacaaaccttctcgcaacgcttacatgagatacaactatctgttgcataaaaatgtttaggagacatttgaaaacgattaaacaaaggatttataattctcgtttttagaaaaggcaggcttccttcgtgacaagaaaaaatcttctctctcctgcttatcaatgcatttatttcagtaagccgtggaactgcatttgccaacttaatcctctccaactccttagtatccacatcaaaaccgggaagcaacacataattattgggcatagtaacagaaaaaccggcatgacacagcaaccccttatcattcaacgctttcaccaacacttgttgagtaagtcccgtatcatccccacaagaacaaacaaaaaacaaatactgattctggtattctttcaaagaaattcgattgataaagcgcagtacaatttcaggaggagcccatgagtaaatcggaaacacaaaaccaatcttttcatctttctgcaaatcgaactccagcgcctcatttttcaatgcctcagggataaagaccaaatcttcattttgtcctttagagagctgatttgcaatccattcagagttacctgtaccggagaaataaaatatcataggagagtatataaaaaagccgtaccgacgatgtgatgaaactctgatagaacaagatttgagtgcccgtcccctttgtaatccaccggcttaaagctgtcccgaaggatgtggcccgccattgaagatcgaagctttctcggtatatcagattaatttgaagagtttcccgatccagtcgatacggctaatatttttgtatcacaaatataataagaatcccggagaatagcaagaaaaaaaaggattttgtttgcctactaacatttttttcattcccttttatctgcctaacaaaagaaaaatgtcagttaccggttaagtaactgacattttgtaaatcataaactgttgaaacttaagcagcttttgcttttgcaactacagctttgaaagcttccgggtgattcatcgctaaatcagccaaaaccttacggtttatttcgataccggctttgtgcagaccgcccatcaatttagaataagacattccttcaagacgtgcagcagcgttgatacgttgtatccaaagagcgcggaagtttcttttcttatttctacggtcacggaacgcgtaagtcaaacccttttcccaagtgtttttagctacggtccatacattctttcttgcaccaaagtaacctctggtcaatttcaaaattttctttcttcttgcttttgaagcaacatgatttactgatcttggcatagttttactgtttttgaatgttagcgccgctacttcacgcagcgaacttcaagctaatgcattcggttaatactttaataatactttgtacgcttttgattacttcattgctaagagttccttaacctggcttacatttgttgtatcaacagttgtagagtagcacagatttctttttctctttttggttttcttagtcaaaatgtgactgtgaaaagcgtgctttcttttgattttacctgttccggtaagggtaaacctttttttagaaccggagttagtcttcatctttggcatcttacttgtttttaaattattaaatatataatggtaacgcactatacctgcgcgttacgcaccttttcttattccgcgtccgttttcggcatttccgctttctgtgcaggagcagcaggtttcgcaacaacaggctttttcggagcttctttctttttcggtgaaagctgaatagtcatacgctttccttcgagtaccggcatttgatctactttcgcataatcttccaagtcattggcaaaacgaagtagcaaaacttcaccttgttccttaaaaagaatagaacggcccttgaagaacacgtatgcttttaccttatctccgtcttccaaaaatcccttggcatgcttcaacttgaagttataatcatggtcatctgtctgaggtccgaaacggatttcctttacattgaccttcacctgcttcgctttctgttccttctgacgtttctttaactgataaagaaatttagaataatcaataacacgacaaacagggggttgagcattaggagaaatttccactaaatccaactctttctcttcagccagtttcaaggcctgaaagataggatatacttttggttcaatatcgtcgcccacaatgcggacttctttggcacgaatctgttcgttgattctgtattgcccttttagagtgtcattcttcattaaaaacgtttacttcctagtttgatctttttattgttctactaaatatttatcatgaaacggctgcaaagttaccatttatttatcatattctgaacttcttcgttcaaaattttagcaaattcttcaaatttcatggttcccttgtcaccttcgccctgtctacgaacagaaacttctccgttttctgcttctttttcgcctacaatcagcatataagggatgcgtttcatctcattatcacggatcttacgcccgattttctcattacgatcatctacaatcgcgcgaatctcgtgtgttttcaaatacatctttacctgctctgcataatcgttgaacttttcactaatcggcagaataactacctgttcaggagtcagccacaacgggaacttaccggcagtatgctcaatcaatacagcaacgaaacgttccatagagccaaacggagcgcgatgaatcataaccggacggtgcttctggttatcagaacccatatattccagttcgaagcgttccggcaagttataatctacctgaatagtccctaactgccaacgacgcccaatcgcatcttttaccataaagtcgagcttagggccatagaaagcagcttcaccatattcaatcttggcaggtaatcctttttcttcacaagcttcaataatagcttgttccgccttctcccaattatcatcgctaccgatatatttctcacggttcactttatcacgcagtgatatctgagcttcaaaattctggaagttcatagaacggaatacaatagagataatatccatcacacggaggaattcatctttcacctggtccggacggcagaaaatatgcgcatcatcctgcgtaaaactacgcacacgagtcaatccatgcaactcaccactctgctcataacggcaaacagtaccaaattcagcaatacgcaacggaagatccttgtaagagcgcgggaagttcttataaatctcgcagtgatgcgggcagttcatcggtttcaggaaatattcctcaccttcttccggagtatggataggctggaatgcatccttaccatatttagcatagtggccggatgtcacatacaatagcttattaccaatcggtggagttattacttcctgatagtcataacgagtctgaatgcgacgtaagaaatcttgcagacgcaaacgcaatgcagtacccttcgggagccacatcgggagccccttacctaccgtttcagagaacatgaacaattgcatttccttaccaatcttacggtggtcgcgtttcttggcttcttccagtaatgccagatactcatccagcattttctttttcgggaatgtgatgccataaatacgagtcagcatcttgcggtcttcatgtccacgccaataagcacccgctaccgaagtcaacttgatagccttaatcggagcagtcgtcatcaagtgagggccacggcaaaggtcagtaaatgtaccttgtgtataagtagtgatatgaccgtcttccaattcggaaatcaattcacatttatatgtttcgccacggtcgccaaacattttcaaagcatccgtttttgcaatgctttttctaacaaccgcctctttctttgcagacagttctaacattttagcttcaatagcaggaagatcgctttccttaatcaccgcttctcccggatccacatcatagtagaatccattttcgatagccggtccgataccgaactggatgcccggataaagttcctgtaatgcttcggccaacaagtgagcacttgtgtgccagaatgcatgtttaccttcttcatcatcccatttataaagtacaaaatcagcatcttcattaataggacgtcctaaatcataagtctcgccgttcacgccacatgccagtacatcctgtgccaagcgcgagctgatactttcagcaatctgtaaaccgtttactccttcgttgtactcacgaacagagccatcgggaaatgttatctttatcataatatgattatgttatattttcacaatttgaacgcaaaagtaactaaatcttttgagttttctattttttatcaaaaaaatgttattccgtttgatctgtaaaacgtttgattacattataagcggaaacgatacccaattctccggctttgctcaaatcagaaatacccagtttattattacccaagaagatatgagtaagtccgcggttgaaataagcgtcagcaaaatcaggattcagttcaatagccttattataatctgcaatagccgaccaataatccttcagcatggcagacacattggcacgattataatatgcataaacaaaatccggagcaagattaatcaccttatccaaatcttttcttaccacctcataatctaccgcagttatctctttacgtgcattatcaccaggaacatctgtatcggcagtttgttcagccttctgatattccaactgcttgcaacggataagcgcacgcataaaatatgcagggaagaaatcaccgtccaacaagattgtctgtgtcaaatcggaaactgcacttgagaaatcctgtaccaaataaaaatcaattgcacgggcaaaacgttttgaagcattcttctcatcatccacgatagctgatgtatgcgtatcaatcaaagcaaaatggaatttcacttgttcttctgtcaacggagcttccatattcgtaatacgaagacgctttggaagtacacccgagcgattcagctcttccacatatttgtggaaattcaccgaccgtttcacatcactcatcttctcataataagtcaaagcgaacataggctccagtgtaatattcacattcttatcctgcacacgtccacgataatcacttgtatagcgctgttcagcttcagaatcatcagctatcactatcttccgatagttattcatattcttatctgatttcttacgggttctatctttatcatccccttcactgtcctgatccggattctggttttgggctacatctttattcgtcactccgttctgtttatccagttgagccttcaagagtttaaattcatcctgttcagcacccttccggtcccctattttctttcgggcttcagcacgctgataatatccggcaaggaaattcgggtgttggttgataacagttgaataatcctgtatagctccacgataatctcccgtctgtgcacgaagcagaccacgattaaagattgccatcatattatccggctccatttttataacaaagtcgaaatcttcaatagcacggttatcatctcctacccttgcacgcaacaaaccacggttatagtgcccgataaaattattcggatcaatatccaatgccaagtcataatcactcatggctcccctcaggttattctgatgaaatctggccaatgcgcgattaatataattcccggcattcttagcactcaaatgaatagcacgatcgaaatcagattccgcttccccgtattttgactgttgcaacttgacgatcgctcttgctgcccatgcgtccggatcgtatttatccaattcaagagctttattgaaatcattcaatgcggcaatagtgtctttttgctgtaaagagacctctcctctcatcaggtaagcgcgagtataacgcggagatactttcagcaaactctccaaatcttcttttgccgaatcataatctttcttctgaatatgtgataatgtcagattatgccacaaagtaatgttctccggatcataatgcagcgctttctgatagtcttcaatagcaccgtcaaatttactctgccggattctcgccagaccacgaatctgataagcaccaaccacaaacggattacgttgaatagccgcgtcacaatccgcttccgctccctgaaaatcttccagattcagcttggccagtgctctgaagaaataaggttcatacagataaggcttagcattaattacctggttaaagtactggatagaaagtacatagtcctcaaaataaagagcgttccgggctatggtcatcacccggtccgtatttatctgagcacacaccaatgtggggaacagcattaaaactgttagtatttttttaatcatcgacattttatacttgtaaacgaagcaaaaataatgcttttcgcttacttaacagggatataaacgttttttatctttatttcacctgtttcatcttataggaactacgtgctttccctttcaacatcgtattcaatttgccttttatcatttgtttacgaagtgcagagatatggtcgataaacattttaccgtccaaatggtcgaattcatgttgcatcacacgtgccagataaccttccacttcttcttcatgctccacaaaatcctcgtccatatatttcacacgaattttatttcctcttttcacggtctcatgaataccgggaagactcaggcagccttcttccatactcacttcctcacctcctatttccaaaatatgaggattaatataagctttattaaaacctttaaattccggataatcttctgaaagcgggtccaatgtaatcgtaaccacacgaatgggcaaaccgatctgcggagcagccaatcctacgccatcggcatgcaccattgtttcaaacatgttcgctatcaattctttcagattcggataatccggggtaatgtcctctgccacctttctcaatacaggctggccatatacataaataggtaaaatcatatttttatactctactaaaaattaagttattctatgttcttctactaaaaacgtttactctccaaatatgtttgcaaaataatagtcgcacttatttcatccaccaacgctttattctggcgatcttttttcttcagccctgcttcctgcattgtgcgatgcgccagaaccgatgtaaaacgttcatccacatattcaaccggaatatccgggaagcgttttttcaatgaacgaacaaagggttctatgtttttcatattttccgaaaactcattgttcatttgcctgggtaaaccgacaatgatccgttctaccggctcttttgcgatataatcaccgataaaattcagaagttcatgcgtcggcactgttgtcaggccattggcaatcaactgcatcgtatcgctgacagctatccccgtacgctttcttccataatctattgctactatcctgctcatggggcacaaaaatacaaaaaaagacgcttcctatgaaaggaaacgtctcttttattctattatttagatgtatattattcttcaacaatagctacacggctcagtttagcgtcatcatagaacatattgcctacaccacccttgtagtcaaccttcaactgagaagcaggaactccgaattcgttaaccatcaggtcgcgaacagcttcagctctcttcttactcaacttcatgttgtattcagcagaaccagtacccttgtcagcatatcctgttacagtaaatgtcttgtcaggattagccttgatacccttagccatagcttcgatattcatgtattctctcttgctgatattgctctttccgatgttgaatacaacaacaagacgtggaacaaatccgccttctttcttaacgataacttccggtttcttgttacgtgcttcaaccaagtcacgtttcagagattcgttttcacctttcaaagcatttactctgtctctcatgtcattcaactggctttccggaaccattggtacagtaggaacagcattccagccgcgtttcttgaacttataagtaacacctactgtcacgccacccattccttctttgctagcgccaccaaatgcatttttcatcaaaaggccacgcaattctacattaaggtctaaagcaggagacaagcggaaacggttgatcaaaccggcatttatacccaaattcttctcacgaggttctgaccatgacacagccaaaccagctcctacataaggaataaatgaataaatacgatcttcattgtatccgcacaacatgttagaaaggttgaacagaacatcaccatggaaattagccatattccatttctgtttgtaatatccgttagaatatgtaccaccttttgcatacctagcgtcagcagaaggagctgctcccttagcttgaagaccattgtatgcaagacgcaatccgattcccggagtaaaccacttacctacggcaatatcaagtgccggagcaagacgttttccgaaatcagctttaccgtcattgtcgccaaaatacatttgtgcgccaataccaccactaataaaccagttagcaccgaagcgatttgtttctacggtatagctcttcgctgcattttctttttcctgagcaggcagacatacagaggccgctgccaataaaataaacaataaaccctttttcatctcaatttattttagtaaataatatatttctatattttgtcttacaggaaatcaaccgactcccaaacgtctcatgcctgacaaagagacaataagcaacttccttttcttgaaatttaatgcaaatatagatatttaatataacacaagcaaaaaaacgcgtaaaaaatcattcccacacaaaaaaataaggaatgataaaagtgttatataactccgaaagaagacgaaaggcatttattaccaaagaattaaaacaaaaaaaatagccggcgataattgcatcaccagctattttatttctttaatattatatctaataaaccagtttcacattatcaacccataatgaattacccggcgaaccgatataggctcctccatgactggacgtaaactgtatatatatatgtgtaggcacatcatcttcatttccccaggcaacttcatgaataggaacgctttcccctttactgtttaccgtatagttttcggtaacttgtaatcgcatcatatgcgctttatattcagggcgccctgtaatatcaccatacataatctcatacgaagcattatttttccagtcggtagaatgataataataagtcaccatagtccctatccgtttggcataaacatttccgttcgcatcttcccaacgtttttgcaaaaacagaatagctgccggataatcttttccgggcacatccgtaatcttactgaaaccggtagcacggatacgattctccctgtccgacatcttcactttataatcaaattgaagtgccaccggttttttagtaaacggcacgccacattgcaacatcttctgcggattcttagtacccttaataggttcatgcaccgtccctgtaaaaatagaacctgccgccaacacagtgatattaacaagccccaacactttcacactttccatgcgtgtatccagacgtgcacaatacccttctccccttttttccgggaaaacagacgtatttgtttttgtaattcccgctacctttgccattacattcgaagtaccccacggtgaaccacccatgtttttataaacctgatctccttgaattacagccgtcggtgcaatctcatacacattcttcgtatttcctccgataattcccgattcctttatctgccggtctacccattggtccatatctccaaaaggaaacatttccactttatgctgtgccagcaaagacaaggaagaaataaatgcgacaaaagttgtcaccaccaggcgatgaacgattttctgaatcattaatacctttcctttcttttataaattataatcccattgtttcaaagcaaaaccccagttttcttctaccaatcgaattgtccggtcatcatatttatatttattctttttatatcctttcttaccgccgacatatttttcaatatctccacgcgcttcggcaaatccgggaatagagagtgacttataaatatcctccgtcattcccattgcatcggcttcgaaatcctcaaacttcacttccctcagattaccctcaggaataaactgcttgtccgattcatatttatgatagagtttcgcatagatagaaaggatattttcctctaattgttcatttccgatatcctgcaattttaacggttggatcgtatttgtaaagaaactgcgtgtagattcaaataccgtatacggattgcgcatcagataaataaacttagcattcgggaacattttcaccagttccctcactctaccggtatgaggcggattcttgctaaggaattgcgtgccatgagtattccacaacgaaatctttatcagcttcgtaaatacttcttcaaacaccttcaactccgcatccgagatattgtcaaacaacagatacttgtcagcatattcctgttgatatttcggcaagaaccaaaaattataataagtataaggcatcatgtttgccagtgcaaattcttcttcctgcggcaggtctactgccagctccatgttgtccgtcggacgtttatccggcatcagccaactcatattcttcttgaagaaaggctgtccccacatcatcaaatgaggaaacacggtctgataggtcgtattatagccaaaatgcttatcacaggagaatacattgtgcacaaaagtagttccgctccgccagtgccccaaaataaacaccggatcatgctccagcggttgattcgccaacaacttctcataacgtttgtcctgcaatgaggccaatggagaaagcaatcggcatacagcctttgtcaatcggtacttacccttataggctgcatcaatttcacgaccggcagtaattgctttaaaagttttccagtcggcacctaccaatgtattgatcggaagtttattaaattcgagtaatcccatactttcttattttattattttcacggcaaaaccctggcgttccagttctttcaccgccttttctactgcttcataatgttcgggggcgattcccaacttcgacagatccaatacaggaatatcatccgtattgctcatatccttcatttccacccgatcgataatcatacctaccgcagaagtattgttggtaatcgggtcgatcaggataaatgagccacatgatttattcttcttataaggatcaaagaacaactctttcgcggttgtcagcaccacgcaggcaatctgattcaattgcaaaggcagagtctcttttgtcaactgtccattgtccggcgacagatgttccattgtgttcacatccaccttatacttaatcgtatcaatgcgcgtacgactcagatttgttgtctgtttgataaagaacgatttatttatatccattggctcctcatccatccataccaacattgcttcaaagttacggtcaacaatcggcaagttatcgggatgtaccagcatttcaccacgggatacatcaatttcatcttccagtgtcagtgtaaccgactgtggagggaaagcatagtccaactcaccgtcataagtcacgatactcttcactttggacgtctttcctgaaggcaacgccattaccgtatcccccttacgaacaatacccgaagccaccttaccacaaaaacctctaaaatccaaattcggacgcagcacatactgcaccgggaaacgaaaatcctccaaattatggtcattgtcaatatgaacagtttcaaggaaatcaagtaaagaagtccccttgtaccacggagtacgctccgacttatccactacattatcaccgtccaatgcggaaagcggaatacagtttacatcagggattcccagtggagatacaaatttcttatactccgcaacaatctcattgaaacgctcttccgaaaaatccaccaagtccattttattgaccgccaataccacatgtttgatacccagtaaagacaccaggaaagtatggcggcgagtctgtgtaatcactcctgtgcgtgcatccaccagaataattgccagatttgccgtagagccgccggtaatcatattacgggtgtactgctcatgtcccggagtgtccgcaatgataaatttacgtccattggtggagaagtagcgataagccacatcaattgtaataccttgttcgcgttcagccttcaatccatcgagcagcaatgcatagtcgatatgctcacctgcatttcctacacgtttactgtcgcgttccagtgcatccaactggtcctcatacaatttcttgctgtcaaacagcaagcgaccgatcaatgtcgattttccatcatccaccgaaccggctgtcaacagcctcagcaagtctttctgttcatctttgtccagaaaagcctttatatctaatttattatctgccatcactaattacaattaaaagtatccttcacgtttcttctgttccatactcgcgtcctgatcaaagtcaatcacacgagtcgtccgttcactcttggtagtagtcatcatctcctccacgatttcttcaatcgtagcggcaccactttccacagcacccgtcagcggccaacaacctaatgtacggaagcgaaccatcttcatttcaatccggtcgcgatatttttccggcagacgatcatcatccgccattatcaggttgccatccatttgcaccaccggacgttctttcgcataatataacggaacaatcggaatattctccaaacggatatactgccatatatccaattccgtccagttactcaacgggaacacacggatactttctcctttatgtacgcgggcattataaatatcccacaattccggacgttgatttttcgggtcccactggtgaaacttatcccggaaagagaagatacgttctttcgcacgcgatttttcctcatcacggcgtgcaccgccaaaagcagcgtcaaacttatacttatccagtgcatgaagcaacgcctgtgttttcatcaagtccgtatgcactttacttccatgtgtaaaaggtcctacccctgcatgaaaagcctccatattactttctacgatcaggttccatccatatttcttcgcatactcatcacggaactgaatcatctccttgaatttccatttcgaatcaatatgcatcaacgggaatggtactttacccggataaaacgctttttcagccaagcgtaccattacagaagaatcctttccaatactataaagcatcaccggattctcaaattccgccgccacttcgcggatgatatgaatagactcggcttcgagttctttcaagtggcttaatttatattcttccattactaaaataatgattttattcttctactaaacacttctttttactttgggcaaaaccagctccaacaagcaattcaccgattcttccagtgtcagtttggaagtatccaatgacaatgccggatgttcgggaacctcaaacggtgcagaaattccggtaaaattccgaatttcccccttacgtgccttggcataaagccctttcacatctcgtttctcgcactcctccaacggggtactcacaaaaatctccagaaagtcatccttaccgataatatttgcagccatttcccggatatcgttattaggactgatgaatgccgcaattgtaataatgccactatccaaaaagagctttgagacctcagctatgcgacggatattctccacccggtcagtttcggaaaatccgaggttattattgataccactacgaatattatccccgtcaaggatacggcaaagcaatcctcgcttatgaagttcacgctccagtgcgatagcaatcgtacttttgcccgatccgctcaatccggtaaaccagatcatcacactatgttgccccaaaagttcctctttgtcctgccgtgtcatcatgcggtcaaatataggatatatatgattcttttcttccatttataaattcgttttattaaaagttccagatcatcggaatcagaataacagagattataaaggttatgatattgagcggcaaaccgatacgaacaaagtccataaatttatagttgccgataccttgcacaatcagattagtctgataaccgataggtgtagagaaactggctgaagcagccatacagatcacaacaaagaaaggcgtcggactgactcccaactgcgctgcaatcgacagggccaatgggaatgccaatgctgccgccgcattattcgtaatcaactccgtaaacaggttcgtgatgataaacaacatggcaagcaacacgtgcggaccgtaatcatcgctcaacccgataatgaacttcgcaacactatcagccactcccgaattcaccatagccttactgattgcaaatgcacaagcaatcgtaatcaagatatcccacgaaatgtattttgtatatttacgggcaggaaacaggttcgtccacgccataacaatggtggtgatagacacaaaaaagaacatatccagtttgatatccggaaacatctcttttgtcaccggcaattcaccgatcgtagcaccgacaatcatcagcaccaataaaatcagagctagccagcgttttttctttcctgcggtatcagggtcatttccgtttgtcagcaacacaaacacagaagactccccccatgtaggaataaaggtatcatcagccattacaacaagcgtatctccttcacgtagcaccacttcattcagattagttacgaaccgctgtccgctacgtgtcttgatctcctttacttccgctccataatgacgctggaaattaaaatcactcaacttcttattgataccggggaaacgtgcccctaacaccgcttccacccgatgcaatttctccccctcttccatttcctcatccggcacagccgtatcaggacgagcatccggcaaaagtcgtttggagaaaaggaaaagataaacaattccggcaacagcaataaaaatgccgacctttcccagttcaaacatggagaaaccttcaaaaccggcttctaaaatcattccgtgcactaccagattggtagaagtaccgatcaacgtacaaataccaccaagaatagtcacgtaagaaagaggaatcaggaattttgttgccgggagattaaccgatttcgcccaatgtttgataatcggggcgaagataaccacaacaggagtattattcaggaaagcggaaatgaaagccaccgaaggtaagatacgcaactgtgctttaaacaccgacgtcttgccctgtggaagcaatttctttatcacttgccctaatgtacccgattggcggataccttcacttaccagaaacagtagggcaacggtaatcatgcccttattactgaacccttccagcatttctttcggggtcagaataccggcacacaaaaacaagaccactaccgaaaaaagtatcatgcccggacgcattttgtcagcgaccaaagcagctaccattcctaataacgacaacagtacaaatacaatttcaaatgtcatataaacattaattagtgttttctttttggctcgacgataaaccacggattcaataaatcctccttgttatatcgtagaggttcgtcctttccggcttgatacacttccattccggcggcacgcgctatcgcatgtccggcagctgtatcccactccattgtcggagcgaaacgcggatacacatccgcactaccttctgcaaccagacagattttaatggaacttccacttgatatcagttcgacactgccatgtttcttcttcaagtcagcgatatatgtttccgtttcaggtgacaggtgcgaacgtgaagcaacaacaataaaatgatcacgtacatcctctaaaggcatcagctccgactcttttatcatctgttgtaatgtcgtccctttccctaccggagcgacaataccggagcacttataggctcctataccttccacagcaaagtaaagcactctctttacaggcacataaataacgcctaacacaggtactgaattctgcaccagggctatatttaccgtaaattctccattgcgtttaataaattcctttgttccatccagagggtcaacaatccacaaagtatcccatttgcggcgaacctcataatccagatgctttccttcttcactaagaacaggaaaaggagtatcgttcaaaatagtcacaatcgcttcgtgcgctttcctgtctgctattgtcagaggagaattatcagcctttctctctatctcgaagtccgatgccggatcatcataaatagaaagtattttttcaccggctttcaatgctgcatcgatagcagccattacatatttttgttccatttaattcctttattaacacctcactaatatcaaggctgtaaatcctctaaattaagagttgacaaaagtaaaaactttctttgctataaaagtttccccacctacatttataacttcttttagtagaatgataaaaatatctaaacgaaacatcattttctctctcaacaaaaaagcagtaacttcccagttaccgccttcttattcggaaaaaacgttggttcttcccaatatatattaccaaaaagaaatcaatatacacgatacagcaaccaagcgccttggaaatccgaacgattcggatacttagccttgaaagcatcgcgagcgtcagcagcagcagccttatcagcaaatgagctaactattacacgatacattgccttatcagcgttaaatgcgattgtagcctgataaccttgtgcatccagccaatctttcaatccttcggcatttgcttttacaccaaagctaccggccactacactataatctttcaaaccgtcattaccggaaacgactgtcaccttttcctgacgtacacccgatgtatctgctactttaggtgttgtcacaggagctgccactaccggagtcacctcaaccggagcttccacttgcggttctgccagttcttgctgttttgctttctcgtaagccttcttataggcgctttcgctggatttacaagatgcaaaagcaagcaccaagcacactcccattcctaatacgaccaattttctcatattcctatactctgttttaattaataattcatgttctcgtctatcaatattcagtttcgggcaacaaaataatagaaattttatcatccggcaaagaaatccggcgaaaaaacgcttattcggactttttcttataagaaatcgttcctgttgcctgattagtcggcattaaaagcacttccgcaatctgaatatgttcgggagccgaagcagcgaagtaaactgtctcagccacatcctctccggtcaacgggcgaattcctttgtagaaattatcagccgcctgcttgtcaccccggtaacgcaccaccgagaagttggtttccaccatacccggtttgatattcgtcactctcagcggagtatccaccaaatcaatccgaagtccgtccgaaagggcctttacagcagccttagtcgcacagtacacacttcccccggggtaagccgcatcacctgcaatagaaccgatattgatcacatgcccccgcccgcgctctatcataccgggaaccacaagacgcgtcatcgtcaacaatccctttatattcgtgtcaatcatgatgtcccactcgtccagactaccctcgaactctttatccactccgatcaccagtccggcattgttaatcaacagatcaatcgttttccagtccgccggcaagttttccagtgcagccttcacctgttcacggtcacgtacatcacaaataagcggccttgtcactagtttaggacactccatttccaactcatatatcagcttctccaactttgaagtatcacgggcattcaaaatcaaattccaaccttctttggcaaacttacaggcacaagctttaccaattccgctagttgcgccagtaattaaaacagtttttatttccattatgtttaaattataaatactgaatgacaaaagtacgccttaacttccattggttagtctccaaagtccgttaaataagattaaaccataaaagaaaaaaagaaatataaaactatgcacttttttttagttttactgaacaaccttagaagaaaaatgttatatttgttgtatcataatcattttaaacattatacattatgaaaggattgaatgttttagcagcttttttgggtggtgcagccgtaggcgcagcccttggtattctatttgctcctgaaaaaggagaagatacccgtcacaagatcgccgagattcttcgtaaaaaagggattaagctcaaccgtagtgaaatggaaaatctcgtggacgagattgcagccgaaatgaaaggagaaatagcagagtaagtgagtaaccaaggatttaaaacagagcgaccatgtttgcagacgataaaagtattgagaattttcagcagttatttttcgagttcaagaaatatttagaacttcaaaaagaatacaccaaattagagttaacggaaaaactgactatcctgttttcaacgttaatcatggtattagtacttatcatcttaggcatggtagccctgttttacctgctttttgctctggcttatgtattagaaccattggtaggcggcctcatggcaagttttgccattatagcaggcatcaacgttctgctcatcgctcttgttattattttccgcaagcaactcatcatatctcctatggtgaacttccttgccaatttatttttaactgattcaaataaataaattatgagtgcgcaaacaccacagaaattcacattagaagaaatatccctacgcaaaaagaagcttttgaatgagatacatgcccagaaaaaagcaatgacagccacaacacgcgagatatttgcccccattgctccggctaacaacaaggcagatgctatcatgcgttcattcaatacgggcatggctatattcgacggtgtgatgttgggggtcaaagttatgaggaaggtgcgcacgtatttcaggaatttaagataattcgatcttctcattaagtagaagtatatacttcagtaacacatttcaatgtgagcgagtacagtaagtacactttttcaggccttcccctacacacgcacacatgttatagtaatatagaaaaaaacgaataaaacggcggaaactcataacaaccgttgtctattgcccttcaaacaagttattccgattttttagctattatagaaaatagatacttgacataagtattttggaaactgaactttaagttacattattaggttcttcttcaaatttagtggtaatttgaagaagaactcattattatatacatgcgtgtgtgtgtatgtggaaaagcctgaaaaggtgtatttactgtatttatgtctgcaaaatgaagcggcgttatttaactgctaaagcatagctttagagattgtaaagctatgctttagcagtcatgaagcacagctttctaaaattcttccgaaatatgagatattataaaaaaggcttccaacccgtggaagccttatgcttgtcgaagtaacagcttcatctcaatgaagctgaaatatccttttatacgtaagtctccagcaacttcacgtttgcactttcaggagtaatagtaatatcctgagtggtagcggggagcaaaatagactctccggcatttactgtcagttcgttgccttcattgtccaccattttgcatgagccttccatgcaaataaaaataacgaatgaatcgagttccgaatagtcacaactgatttcttcggtcatgtcatacaaagaagtggtgaaataagggcaggcaaccaactctaccggttcatccttcaacggttcgtatttggtacgataatcatccaatacttcgtagttgatagcttcacgggccaaatcggtgtggagttcacgtgttttgccgttcgcatctttacggttgaagtcgtagatacggtaagtgatgtcggaagtttgctgaatttcagcgatgaacgcccccgcaccaatgctgtgtacacgtcccgcaggaaggaagaaaacatctcccggatgaatctcgtactcttgcagcacatcggtaatcgtattgttcaatacgcgttctttatattctttcggagtaatctgttcagaaaatcccgaacgcaatttagctcctttgtcagcatctaccacataccacatttctgttttacccattgagttgtgacgttttttcgcaaggtcatcggccgggtgtacctgaatggacaaatcctgcttggcatcaataaacttaatgagtaatggaaatttgtttccgaaacgggcataattcgcttcacctaccagttcctcgcgataccttctcaccatgtcggcaagggttaaacctttatccgggccattggccactacggattcattgtcctcaacgccggaaatctcccagctttctcctactcctttcaagtctgaattcaaatgcttgaacggaataattttgtcgcccccccaaagcgtctgcttcagaattggttcgaattttaatggatacatttttgtttttcttgttataaacttagattaaattcgctcggattgcatgaatccgggagcaaacatacaaaaaatagtttagttttaagaaaaggacgataaaaatctttttgaaaaaaaacataccaaaaagaataggaacattaaagtaataacgctaaactttcctaaagcacctgctatatttagtccgaataatttgtgagtaagaaagaatttgcctttatttgcaggaaaattttaataataccagacatgaataacacattcccaacagagggaaatctttcagggctcagccggaaagattttcaaaaggatataaatgataaaaaaacagatttatttatccttaaaaacaaaaagggaatggaagtggccgtaacgaattacgggtgcgccattctttcgattatggtaccggacaaaaacggtaagtatgctaatgtgattctcggacacgacagcattgaccatgtaatcaacagcccggaacctttcctgagtacaactatcggacgttatggcaaccgtatcgccaaaggaaaattcactttgttcggcgaagaacatgaactcacaatcaacaacggccctaactccttgcacggaggacctaccggtttccacgcccgtgtatgggacgctatccagattgatgaaaataccgtgcaattcaattatgtttctgccgacggcgaagagggattccccggtaatctggaagtagaaatgacctaccgactggaaaatgaagtgaatgcactgactatcgaataccgcgccactactgacaaagcaacggttgtaaacctcactaaccacggtttcttcaacctcgccggcatctccaatccgactcctaccgtcaacaacaacatcgttactatcaacgctgatttctatacacctatcgatgaagtttctatcccaaccggagaaatcgccaaagtggaaggaactcctatggacttccgcactccgcataccgtaggcgaacgtatcgacgataaattccagcaattgatattcggtgccggatacgaccactgctacgtattgaacaaaacagaaagcggttcgctcgacctcgccgctacctgcaaagatcctgagagcggccgtatcatggaagtatacactaccgaagcaggcgtgcaactttatacaggcaactggctgaacggattcgaaggcgcacacggcgctacattcccggcaagaagcgctatctgttttgaagcacaatgtttcccggatactccgaacaaaccgcatttcccgtcggctaccctgctgccgggtgatgaataccaacaaatcacagtttacaaatttgatgtagaagaataacaactaaaaaataactaacctaattttataaactaacattttttttgaaccatgacacaagaaaaaaagaatggaaaaatcattgcaatcattacgatgattttccttttcggtatgatttcatttgttaccaacctcgctgctcctatgggtatcgtgttgaaaaaccagttcgacgtatcgaacgcactaggtatgctaggaaacttcggaaacttcatcgcgtatgcagtaatgggtattccgagcggcatcttgttgcaacgcgttggatataagaagactgcactgatcgcagtagctatcggttttgtaggcgtaggtatccagttcttatccggccattcaagcccggaaatggctttcgccgtttatttgatcggtgcattcgttgcaggtttctctatgtgtttgctcaacactgtagtaaacccgatgttgaacaaattgggtggtgaaggtaacaaaggtaaccaacttatccaggtgggtggctctttcaactctgtaatggctaccattactccgatgttcgttggtatcctgatcgccggttctatcgaaaaagctactatttcccagattttccctgtaatgtatacagcaatggccgtgtttgctttcgcattcttcgtacttttatttgtacgtattccggaaccgaatgctgctaccacaacagaaccgatcagcacattgatgaaaggtgctttgaagttccgccactttgtattaggtgctatcgctatctttgtatacgtaggtattgaagtaggtgtaccgggtactctgaacctgttccttaccgaccctgtagaaaaaggcggtgccggcattgcttctactatctccggtttcgtggtaggaacttattggttcctgatgttggtcggccgtctggcaggtgcttcacttggcgctaaaatctccagtaaagcgatgcttacttttacatctgctctgggattaattttagtattccttgctatcttctcctccacaggaacattggttaacttgcccgtactccaacaaggtgagacaggcggtttgtcattcggttttgccgaagttcctatcaacgcaatgtacctggtattagtcggtttctgtacttctatcatgtggggtggtatcttcaaccttgctgtagaaggattgggcaaatatcttgctgctgcttccggtctgtttatggtactggtttgcggtggaggtatcctgcctgtacttcagggctgggtagctgatgttgccggtttcatgccaagttactgggtaatcattgctgctttggcatatttgctgtactacggtctggtaggttgcaaaaatgtcaataaagatattccggtagaataatctattactgaactcaatttattcaccttataaaattaaattatcatggatatagaacacgtaagaagtcgcttcattaaacatttcgatggtactacaggatttatatatgcctctccgggacgtattaacctgattggcgaacacactgactacaacggcggattcgtatttccgggtgcagtagacaaaggtatgattgccgaaatcaaaccgaacggtactgataaagtaagagcttattctatcgacttgaaagattatgtagaattcggtctgaacgaagaagacgctccacgcgcaagctgggcaagatatatcttcggtgtatgccgtgaaatgattaaacgcggcgtagacgtaaaaggattcaatactgctttctccggtgatgtgcctctgggtgcaggtatgtcttcttctgctgccttggaaagtacgtatgcttttgcattgaacgaactgttcggtgaaaacaagattgataagttcgaactggctaaagtgggtcaggctactgaacacaattactgtggtgtgaactgcggtatcatggaccagtttgcttccgtattcggtaaagcaggcagcttgatccgtctggattgccgttcactggaatatcagtatttcccattccacccggaaggctatcgtctggttttaatggattcagttgttaaacacgaactggcttcttctgcttacaacaaacgccgccagagctgcgaagctgctgttgccgctatccagaagaaacatccgcacgttgaattcctgcgcgactgtactatggaaatgttggaagaagctaaggctgacatcagcgatgaagattatatgcgtgcagaatacgtaatcgaagaaatccaacgcgtactcgatgtttgcgatgctctggaaaaagatgattacgaaactgtaggtcagaagatgtacgaaactcatcacggcatgagcaagctgtacgaagtaagctgtgaagaactcgacttcctgaacgactgcgctaaagaatacggtgtaaccggttcacgcgttatgggtggcggattcggcggttgtactatcaaccttgttaaagacgaattgtatgacaacttcgttgaaaagacaaaagaagcattcaaagctaaattcggcagaagcccgaaagtgtatgacgtggtaatcggtgacggttcacgcagattggaataagaaattatccgatataaataatcaagaagggcggtttccattacggaagccgccctttcttttcaattaacaattaagacttaaatctattatctaacaaaccttatcgtcatttctttgtaaatttataaacagcaaaagtattcggttcctgctcggttgtaaacacatgaccttcaacagacaccgcagtttcttgaggagtgatggcgaaaggttgttcaagcgtattatccttatccaaatcaagtgaacgaagcttgatgcagcggccattcgataatacgtcttgtttcttcaatccggcaaagttcaaagagattgactgggcagtatttgaagtattggcaacctttacaatcagttcattcttgtccttatcgtatacggcactggcaaagagcccattctgcccttcggctcctgtcacacttttcttgttcatggtaagcggaagcacattagttcctttattttgagcatacagttgctgtacatagtagcttacagtacgcacggaattcaggttgtcaaaccagatcatatccgggcgccactgccaaccttccacatgggcgaaaagaggagcataggtagccatatgcacaatatctgcgttacgctccaatccggtcataaaagcggcttcaagcagagcagcattgaaatgattccatttcttgccctttccgtggcaggcatattcgccggcaaagactttcggccccttacggtcgtaattatcataacgcgccccctgagccagaaaccagctttcgggccgataaaaatgttcgtctaccaaatcggctttcagacgcttcatttcaggccataggtaatcaaagtcttttccttcggaattcgggccggaacttcctacaatcttgatttccggatgaactttgcgaatagctttgataaacggttcgaggcgttcggggtactcttctccccactgttcgttcccaataccgataaattccagattgaaaggcgccggatgtcccatatcggcacgtacttttccccaagttgtatttatatcaccattggcaaattctatgaggtcgagcgcatcctgaatataactatccaagtcgcaaacagcgacatgagccttcgggtcactattctgatattgacaggacaatccgcaattcaaaataggaagcggtgccgcccccatttcttcggacaacaggaagtattcataaaatcccaatccgtagctttggtaataatcagggaagaaacggtgggtaaacgtatattgccagcgattctcattcaaaggacgattctctaccggacctaccgacttcttccagtcataacgggttgccaaatccgtcccttccacaatacaaccgccggggaaacggaagactcccggatgaatatctgccaacgcttgggccagatctttacgaagtccgttttcatgccctttccaggtatctaccggaaaaagagaaatgtgttccaaatctacggttcctttagaggtaaggaaaatgcggagcactgctttaggatttgtggcaccgggtttcagaattatctgatattttttccattcttttgaatcaatcgcaagactctgtgtggcaaaagcctggtgctcgcccattgatttggtatcgaccaattcaatacgtaatgttgctttcgtacctccctgtggcaatcgtgcccagacggagaaacgatactcctctccttctttgacgccgacaccgaagaaaccttcgttgtcaagtccggtatgtttatgcccatgtcccgggtcggaaaggcgtacataatgaggattgcgttcaaaagggccgtcatcctgcaatgttacttttccataagtcttccaccccattaggtgttgggggaactcgaatgaacggttcttgaccaattcggcataaagtccgccgtcagcagcataattaatatcctcaaaaaagagcccgtacatggtaggttggatttctgctcccaactttcgggtttgaatcaccatttcattggtttgcgcatgaagtgccattccggcagacaaggctaatacagccaagatttctgtgtatcttctcatggttcttaataaaaaaaattatatctagttatgaatgcaaagataatcagaatcctaattcactctttgcccgatcccaccattaacaggcgtttatcagtcaaaaaggaccaatttccattcatttacatgatttcccagctatgacacgtcatttataatacgaattcatataaaaaataccttttatgctgcacaacatacaagagtgtatttgatacaccaaacaaaagtgttacttttacacccaaaacaagataagtatctcatttacattaaaaataaaaccatgaaaaaacatttcttacttgcaggaattgccgtgctaatgctagttgcgcgcaataacaaaccggcttccgagctgacttccccggaaagcggtatcacagtggaagtatacaccaacgaaccgggtattcaggtctatacagacaatttcctcccgggacaaacttataacagtgaatgtattttcaaattttccgtagagaaataatattaacttataaatcagatttattgtggaagcattagattggctagtaatcggagtcttttttctggctcttatcggtattatagtttgggtagtcagacaaaagcagaatgactctgcagattattttttgggtggacgcgacgcaacatggctcgcgatcggtgcctctattttcgcatcaaacatcggttcggaacacttgatcggtctggccggagccggagcctcaagtggtatggctatggcacactgggaaattcaaggttggatgattttgattctggggtgggtattcgttcctttctacacaagaagcatggtatataccatgccggaatttctggaacgccgttacaatccccaatcacgtacaatcttgtcggttatctctttggttagttatgtgttgactaaggtagctgttacggtatatgccggaggcctggtattccaacaggtatttggtatcaaagaattgtggggtatcgactttttctggattgctgccatagggctggtggtattgaccgcactctatacgatcttcggaggtatgaaatcggtactttatacttccgttcttcaaacccctatcctattgttgggttcattaatcatacttgttctcggttttaaggaattaggcggttgggacgaaatgatgagagtttgcggagcagttaccgttaatgattacggtgatacaatgacaaacttgatccgtagcaatgatgacgcgaatttcccctggctgggtgctttgatcggttctgccattatcggtttctggtactggtgcactgaccagtttatcgtacagcgcgtgctctccggaaagaacgaaatggaagcccgccgtggtactatcttcggtgcttacctgaaactgttgcctgtatttctgttcctgattccgggtatgattgcgttcgcattacaccagaaatatatcggtgccggtggtgaaggttttcttccgatgctcgaaaacggaaccgcaaatgccgacgctgcattcccgacattggtagccaaattacttcctgccggtgtgaaaggtctggtggtatgtggtattctggctgctttgatgagttctctggcttctttgttcaattcgtcagcgatgttgttcactatcgacttctacaaacgtttcagaccgcagacttcggaaaagaaactggtcggtatcggacaggttgctactgtggtaatcgttatcctgggtatcctctggattcctatcatgcgtagcgtaggcgatgtactttatacctacttgcaagacgttcaatcagtattggctccgggcattgccgcagccttcttactgggcatctgctggaaacgtacttctgcgcaaggaggtatgtggggattgatttccggtatggtgatcggtctgacccgtctcggtgcaaaggtatattacagcaatgcaggtgaagtggcagattctacattcaaatatttgttctatgatatgaactggctgttcttctgcggttggatgttcctgttctgcattatcgttgtgattgtagtcagtctggcaacagaagctcccactgccgaaaagattcagggactggtattcggtacagctactaaagaacaaaaggcttccacacgtgcaagctggaatcactgggatattatccacacggtgatcatcctggctatcacgggggcattctactggtatttctggtaattaaataaaaactcatatcaacaaaacaatgaataactattatagctcaaatccgaccttctacatcggtatcgactgcattatctttggttttagcgaaggcgaaataagcctgttactgctgaaaagaaacttcgaaccggcaatgggcgaatggtcattaatgggaggattcgtacaaaaagacgaaagtgtggacgacgcagccaaacgtgtattggcagaacttacgggattagagaatgtatatatggaacaagtgggaaccttcggagccattgaccgcgatccgggagaacgggttatctctgttgcttactatgcattaatcaacatcaatgagtatgaccgcaaactggttcagaagcacaatgcctactgggtgaacatcaacgaacttccggaattaatcttcgaccacccgcaaatggtggagaaagcacggaaactgatgcaacagaaagcatcggtagagccgatcgggttcaatctgctaccgaaactctttacgttatcccaactgcaaagcttatacgaggccatttacggcgaagcaatggacaagcggaatttccgcaaacgtgttgccgaaatggattatatagaaaagactgataaaattgacaaactgggttccaaacgtggtgccgccttgtataagtttaacagcagggcatatcgcaaagacccgaaattcaaattataatcaatatgctggaagaactaaaagaaaaagtatttcatgccaatcttgagttggtaaagcatggattagtcatcttcacctggggcaatgtttctgctatcgaccgtgaaacgggactggtagtaatcaagcccagtggcgtaagttatgatgatatgaaagcagaagatatggtagtagtggatttggaaggcaaagtcgtcgaagggcggctgaagccttcctccgatacccctactcacgtagtactttacaaagcattcccagaaatcggaggagtcgtacacacccactctacttatgctaccgcatgggcacaagccggatgcgacattccgaatatcggaacaactcatgccgattatttccacgacgctatcccctgtacggccgatatgacggaagcagaagtaaaaggggcctacgaactggaaaccggaaatgttattgtgaaacgttttgaaggattgaatcccgtacatacaccgggagtactggtcaaaaaccacggtcctttctcctggggaaaaaacgcacaggatgcagtacacaacgcggtagttatggagcaagtagccaaaatggcaagtatcgcttataccgtaaatccgaatttaacaatgaacccgctgctgatagaaaagcatttcagccgcaagcatggtccgaatgcatactacggacaataaacaactaaaattataactcaaaaattaaatagagatatgaacgcatttgatcaatatgaagtatggttcgtaacaggagcacagcttttgtacggaggtgacgcagtaatcgcagtagacgcacattctaacgaaatggtaaatggattgaatgaatccggtaaactacctgtaaaagtagtgtataaaggaacagccaattcttctaaagaagtggagactgttttcaaagcagccaataatgatgaaaaatgtattggtgtcatcacatggatgcatactttctctccggcaaaaatgtggattcacggtttgcaacagttgaagaaaccgttgatgcacctgcatactcagttcaataaggagatcccctgggacacaatggatatggacttcatgaacttgaaccaatcggctcacggtgaccgcgaattcggccatatctgcacccgtatgcgtatccgccgtaaagtggtggtaggttactggaaagacgaaaacacgctgcacaagatcgctgtctggatgcgtgtatgtgcaggctgggcagattcacaggacatgctgattatccgtttcggcgaccagatgaataatgtggctgtaaccgacggagacaaggtagaagccgagcaacgtatgggttatcacgtagactattgtccggtaagcgaactaatggaataccacaaagaaatcaaagccgctgatgtggatgcattggtagcgacgtatttcaaggaatacgatcatgaatcttctctggaagacaaatcgacggaagcttatcagaaagtatggaacgccgcaaaagcagaattagctctccgcgctatcctgaaagctaaaggggccaaaggcttcactaccaactttgacgacttgggcgacctggaacataatggtttcgaccaaatcccgggactggcttctcaacgccttatggcagaaggttatggattcggcgctgaaggtgactggaaatcggctgctctttatcgtaccgtatgggtaatgaatcagggacttccgaagggatgttctttcctcgaagactatacattgaatttcgacggtgcccaaagttctatcctgcaatcgcacatgttggaagtttgtccgctcatcgcagccaacagaccgcgtctggaagtacacttcctcggcataggtatccgcaagagccagactgcccgccttgtattcacctcaaaagtaggtacaggatgtactgctaccgtagtggatctgggcaaccgtttccgcctgattgtaaacgatgtggaatgcatcgaaccgaaaccgcttcctaaattaccggttgcttccgcactttggattccgatgcccgactttgaagtaggtgcaggtgcatggattctcgccggtggaactcaccactcttgcttctcttacgacctgacagccgaatattgggaagattatgctgagatcgcagggattgaaatggtacatatcaacaaagataccacaatcagctgcttcaagaaagaactgcgcatgaatgaggtttattatatgttgaataaagcactttgctaaaccttaaatagtgatttcgacatgaaattagatgctaaatcaacaatagaaacaggcaaagccattctgggtatagagctcggttcaacacgaatcaaagcagttctgatagaccgggaaaacaggcctattgcccaaggcagccacacttgggaaaatcagttagtcgacgggctttggacgtacagtattgaatccatttggtccggattgcaagattgctacgctgaccttcgttcgaatgtgaagaagttatatgacggcatagaaatcgagagtctggcggctatcggcgtcagtgccatgatgcatggttatatgccattcaacgagaaagaggaaattctcgtgcctttccgtacttggagaaacaccaatacaggccgggcggcagcagaactatcggagctatttgtctataacatccctctgaggtggagcatttcccacttgtaccaagctatcctgaacaacgaaacgcatgtcaaagacatcaaattcctgacaacccttgcaggttatgtacattggcaaataacaggtgaaaaagtattgggcataggagatgcatcgggaatgctccccatagacccggctaccaacaactattctgctgaaatggtggagaagttcgacaatctgattgctcctaaagaatataactggaaacttgagaatattttgcccaaagtactgtcggcaggcgaaaacgccggtgtccttacaccggaaggcagcagaaagctcgacgtatccggtcatttgaaggcaggaataccggtctgtccaccggaaggagatgccggtaccggcatggttgcaaccaatgcagtcaagcagcgtaccggaaacgtatcggcaggtacttcctcattctccatgattgtattggagaaagagttgtcaaaaccctacgaaatgatcgacatggttacaactcctgacggaagcctcgtagccatggtacactgcaacaactgtacatccgacctcaacgcatgggtcaacctgttcaaagaatatcaggaactcctgggtatccccgtaaatatggatgagatttacagcaagctctacaatattgccctcactggtgatactgactgcggaggtctcctctcatacaattacatttcaggagaacctgtaacgggacttgccgagggaagaccattgtttatacgttcggcaaatgataagttcagcctggcaaactttatgcggactcatttatatgcctcggtcggagttctcaagattggcaacgatatcctgttcaacgatgaaaaagtcaaagtagacagaattacaggacacggaggactattcagaacaaagggagtaggccaaagaatacttgcggcagctatcaactcaccgatttcagtcatggaaacagccggtgaaggcggcgcctggggtattgccctattgggttcttaccttgtgaacaatgaaaagaaacaatcccttgccgattttctggataaaaatgtatttgtcggcgacgcgggtatcgaggtatcacctacgcccgaagatctagccggctttaacgcatacatcgaaagctacaaggcaggattgcctattgaggaagcagctgtcagattcaaataaaattttctgccaaagtcaaacaagtttgcaaaacgcccgctaattgtgcgggctgattttgcaagcttgttaaatcgatgctaaaagttagcgggcattttacaggctcgttatatcgacgctaaaaatcattattactctaactattatgaaagccacctcgctcatactcgcatttatcttatccacctcactggctaaagcacaaaacgctccacaggtatcttacttccctctacagaatgtgaaactattggatagtccgtttctgcaagctcaacagactgatttacattatatacttgctttaaaccccgaccgcctgctcgcccctttccttcgtgaagcaggactaacgcctaaagccccaagctataccaactgggaaaataccggattggacggacatatcggcggacattatatttctgccttgtccatgatgtatgccgccaccggagatactgctgtttacaatcgcctcaactatatgttggatgagttacaccgtgcacaacaagctgtcggcacaggatttatcggaggaactccgggaagtctccaactctggaaagaaattaaaacaggcaatatccgtgccggaggtttcgaccttaacggcaaatgggtgcctctttataatatacacaaaacttatgccggattgcgtgatgcctatctctacgcaggtagcgaactcgcccgccaaatgctgattgacttcaccgactggatgattgacatcacttccggtctcagcgacgaacagatgcaagatatgcttcgcagcgaacatggaggattgaatgagacttttgcagatgtagcagagattacaggcgataagaaatatctggaactggcccgccgattttcacacaaaatcattcttgacccgcttatcaaagatgaagaccgactgacaggtatgcacgccaatacgcaaataccgaaagttatcggatataaacgggtagccgaactttcacaaaatgataaagattggaatcatgcagccgaatgggatcacgccgcccgctttttctggaatacggttgtcaatcaccgttccgtatgtatcggaggaaacagtgtacgcgagcatttccacccgacagataacttcacatccatgctcaatgatgtgcaaggaccggaaacctgtaatacttacaatatgctccggctgactaaaatgctttatcagaactcccaaaatccatataatgcgaatgaaccggaccccaattacgtgaactactacgaacgtgcactctataaccatatcttagcgtcacaagaaccggacaagggcggatttgtttatttcacccccatgcgtcccggacattaccgggtttactcacagccggaaacctcgatgtggtgttgcgtaggttcaggactggaaaatcacaccaagtatggtgagtttatttatgcacatcaaaaagacacgttatatgtcaacctctttattccgtcacagctgacctggaaagaacaggggctcactttgacacaagaaacccgttttcccgatgacggaaaagtaacgttacgaattgatgaagcccctaaaaagcaacaaactttagcaatacgcatgccggaatgggctaaccaatccaaaagttattatgtcaaaatcaatgggaaaaggaaggttattatcacgggaaaaggaagtcactatcttcatttctcccgcaaatggaaaaaaggagatgtagttactttcaacttgccgatgagagtcagcgtggaacagatccccgacaagaaagactattatgccttctcatacggtcctatcgtccttgcagcttccacaggcaccgaacatcttgacggtttatatgcagacgacagccgtggcggacacattgctcatggcaaacaaatacctttgcaggaagtaccggcgttgatcggaactcccgattcaatccgcaattctatccataagaacaacggagaccggttatcattcagcttcaacggaaacgtttatccggcacaaaacaagcctttggaacttgtcccattcttccgtttacacaatacccgttatgctgtatacttccgccaggcaagcgaagaacagttcaaagctattcagaaagaaatggcaatggctgaacaaaaagccaccgaactggctaatcagacgattgacctgattttcccgggagaacagcaaccggagtccgatcatagcatccaatatgagcaagcagaaaccggaactgataacgaccgtcatttccgccgtgccaaaggttggttcagctatcatctgaaagtaaagaaagaagccggccgcctgatgattacaatacggaaaaacgatcgtaacaaagttaccattctactgaataatgagaagttgacagttcatcctgctatcagcgaaacagacaaagacggttttatcactctctcctatctgttgccccgaaaactaagtacaggtagctgcccgatacgctttgtccccgacggaaccgagtggacacctgctatttacgaaatacggttactcaactaaatcgctcttccgatcgacctggaatgcgaaaaggtaaatgtacgcgacaaccgcacaggaaatcacggttaatccgggaaatataaaagcaaaaaagcagtcggcgaaatccttacttcggcaaatctgactgatcacaattcttttgaaaatcctaatattgtaaaaccggcacccttcaaagaggtaaaaatcaataaaggcacaatgaaggtgaaacttcctgctaaatctattgttacattagagttacagtaatttaagggcaaatacttattgtaccacaaacaaaaagactgttgaattggtaataaaaaagatagcactttaggattgttaaatccacataaagagttatctttgccaacaatctgacagaaatcaattaaattttaatgatatgaacgataataaacttatgaatcgtgcagcggataacatccgtattctcgctgcttcaatggttgaaaaagccaattccggtcatccgggtggtgccatgggtggtgctgactttataaatgtactcttttctgagtttctagtatacgatcctgaaaatccccgctgggaaggacgtgaccgtttctttctcgatccgggtcacatgtctcccatgctctattctacattggcattgacaggtaaattcacattggatgaattgaaagaattccgtcaatggggaagccctactccgggacatcctgaagtagacatcatgcgcggtatagaaaatacttccggtccgttggggcagggacacaccttcgcagtaggtgccgctattgctgccaaattcctcaaagcccggttcaacgaggtgatgaaccagacaatctatgcttacatctccgacggtggtatccaggaagaaatttctcaaggtgccggacgcattgccggtgcactgggtctggacaatctgattatgttctatgactccaacgacatccagctttctaccgaaacgaaagatgtgaccgttgaagacactgccatgaaatatgaagcatggggctggaacgtacttagcatcaacggtaacgatcctgacgaaatccgtgccgctatcaaagaagcacaggctgaaaaagaacgtccgacgctgattatcggtaaaactgtaatgggtaaaggtgcacgtaaggcagacggtagcagctacgaagccaactgtgctactcacggtgctccgctcggtggcgacgcttatgtaaatacaatcaagaacctgaatggtgatccggccaacccgttcgtcattttcccggaagtagccgaactgtatgccaaacgtgcagaagaactgaagaaaatcgtagcagaaagatatgcagtaaaagccgaatgggcaaaagcaaatccagaactggcctgcaaactggaagctttcttctccggaaaagctccgaaagtagactggtctgttatcgaacaaaaagcaggtggcgcaacccgcgcagcctctgcaactgtattgggagcacttgctacacaagtagaaaacatgattgtagcttctgccgacctttccaactccgacaagacggacggtttcctgaagaaaacacattctttcaagaaaggtgatttcagtggggcattcttccaagccggtgtatccgaattgtcaatggcttgtatctgtatcggtatgtcacttcatgggggtgttatcgctgcttgcggtaccttcttcgtattctccgattacatgaaacctgccgtacgtatggctgccctgatggaacaaccggtgaaattcatctggacacacgatgcattccgtgtgggtgaagacggtcctactcacgaaccggtagaacaggaagtacagatccgtttaatggaaaaactgaaaaaccataagggacacaattctatgttggtactccgtccggcagatgtagaagaaaccacaatcgcatggaaactggctatggaaaatatgtctactccgacaggattgattttctctcgtcagaacatcgctaatcttccggctggaactgattacgaacaagccaccaagggtgcttatatcgtagctggttcagatgagaacccggacgttatcctggtagcttccggttcggaagttgctacactggtggccggcactgaattacttcgcaaagacggtataaaggtacgtatcgtatctgctccttccgaagggttgttccgtagccagcctaaagaatatcaggaatcaatccttccgtcagaagctaaaatcttcggtctgactgccggtttgcctgtcactcttcaaggtctggtaggttgccacggtaaggtttggggattggaatctttcggtttctccgctccttataaagtattggatgagaaacttggatttactgctgaaaacgtatataaccaagtaaaagcaatgctctaatgaaaacaatcggattagcatgcgaccacgccggttttgaactgaaagaatatgttcgcggctggctggaagcaaaaggctgggcttacaaagacttcggaacaaactctaccgcaagtgtagactatccggactatgctcatccgctggcccttgcagtagaatcgggtgaatgttatcccggtatcgctatctgcggcagtggaaacggaatcaatatgacgctgaacaaacatcagggagttcgtgccgcactctgctggaatgcagaaatagcgcacttggcccgtcagcacaatgacgccaatatcctggtaatgccgggtcgcttcatcagtactgaagaggcggacatgattctgacagagttcttctccacacagtttgaagggggacgccaccagaaccgtataaataagattccaataaaataagcctgaaaagacttacaaaataaggcagctattattattcgggggatcacctcaaataaaatagctgcctctattttttttgaataatccaagcgtatatccgggaaatatgtattcaatatttaccacttaaatatccccaaaacattcatttgttttttcgctttcataatccattgaaaatagtttatccttcatacacaaactttttttaagtttataataaaaacattcatcgtttattataaacgggtatagagtttattataaactttcaaaaggcattgcagtagcttatattagaatttatacaacaaaaaaggctgcaaaacctgtaatagattgcagccttaagcctttgaagggattagttataccctaaattccagaagtatcacctaggacatctgttgtaatattacactttattataattaaatatagacgcttatatggattactttctttcattttcaaattttaatttatagttttactgcacgttacttctacaaatatacaacataaaaatgcgtttgtcaagtccttttcattactgactgcatacttgatgtagaaaaagaaacgcttagcgtacaaaaacacagttttttctatcagtatcacttgataaatccgaggataaactgatagcaaaagtaaccgcagacaacaaacttcaacaaagtgcccagtataaatccgattaatgagcctactcctgatttgagtgcttgcgagaactctttattgccaagcaattcaccaatcactgctcccagaaacggaccgagaataacaccccaaggcaagaaaagaagtccgacaagggtcccgattatacatccccaatttccccatttactgccaccgctatacttactgccaagcatcggagtaaagtagtccaacacctgcaccacggctacaatcaacagccagattatcaactgtgtcggagtatagtgtaccttatctgtaaaatgaagaaataccagtcccaaatatgctatgggaggaccggggaggaacggaagcacacagccggccaacccggctatcatgcagagggcgcttattataatcagaataacatccagcataacctatcttatttaatatatgcacaaaaatacggtatctttcaatatatacaaggacatatcaaaactttatatcatccttacctcttcactttcttccgtacctttgtaatctactgtgacctacaaccaccccaaacgtgaaatacaggtcaatcaaaccacttttaattatttattcatctaatatgcaataaactcaaaacgttgcaaatttccgtccacgtttgccccatttacataaataaaaactatctttgcgtttcagaatcccgaaagacgaaagaaatggagcaaatagacaacctaaaagagcttatcaatcaaggggacgtggacacagcgattgagcaattggaccagcttctccaagacacttctgtcgaaaaagagaaagatactctttactatttacggggaaatgcctaccggaaaaaaggagattggaaacaggcactggataattaccagtttgccattgatatcaatccggaaggtcctgccgttcaggcaagaaaaatggtaatagatatcctcaacttctaccacaaggatatgttcaatcaataaaagatatgtttaatcagtaatcgaactcaaagataacgtaataaataaagattatggcaaaaatcaaaggagcaatcgtagtcgacacggagcgttgcaaaggatgcaacctgtgcgtagtggcgtgtccgctcgatgtaatcgccctcaacaaagaggtcaatatgaaaggctataactatgcctggcaagtgaaagaagatacctgcaacggatgtagctcgtgtgcaacggtttgtccggacggatgtatatctgtgtataaagtaaaagtagaataaaagaaaagaatatggcagaagaagttgtattaatgaaaggaaacgaagctatcgcccatgcagctatccgttgcggtgcggacggttacttcggttatcctattactccccaatcggaagtgttggaaacgcttgccgaactgaaaccgtgggaaacaaccggcatggtagtactccaggcggaaagtgaagtggcagctatcaatatggtatatggaggcgcaggtagcggaaaaatggtgctgacgtcttcttcaagtcccggtgtaagtctgaaacaggaaggaatctcctacatcgcaggtgccgaacttccttgtctgattgtcaacgtaatgcgtggcggtcccggactgggtactatccagccgagtcaggcagattatttccagacagtaaaaggcggtggccacggtgattacaaattgattgctcttgctccggcgtccgtacaggaaatggcggatttcgttgcgttgggattcgaactggcattcaaataccgtaacccggctatcatcctcgccgacggtgtgatcgggcaaatgatggaaaaagtggttcttccggcgcagaaaccacgccgtacggaagaagaagtgatagcacaatgcccatgggctgctaccggaaaagctaaaggccgtaagccgaacattatcacttctctggaactgaaaccggaggctatggaaataaacaatctccgtttccaggctaaataccgtgaaattgaaaagaacgaagtacgcttcgaagaaataaactgcgaagatgcagaatatctgattattgctttcggttcaatggcacgtatcggtcaaaaagccatggagctggcacgcgaaaaaggtatcaaagtaggtatccttcgtcctatcacattatggccgttcccgacaaaagcaattgctgcttacgctgacaaagtgaagggtatgcttgttacagaactgaatgccggacaaatgattgaagatgtccgcctggctgtgaacggtaaagtaaaggtagaacatttcggacgtctcggcggtattgttcccgacccggacgagattgtaactgctttggaagaaaaaataatcaaataacgaaacgatgaatcctgataaaataagaaacgtactgaacatcctttttatgatattggctcttgcggctattatcacctactttgttgtaggaaaggaagactttaaaatgtttatctacgtatgcggcgcggcaatctttgtcaagctaatggagttttttatacggttcaccaacagataaggagaagaagttatgactaaagaagaaataatcaaacccgagaatctggtttacaagaaaccgactctgatgaacgataatgccatgcactactgcccgggttgcagtcacggcgtggtacacaagctcatagccgaagtgatagaggaaatgggcatggaagataaaacggtgggaatctctccggtaggatgtgcagttttcgcctacaattatctggacattgactggcaggaagcagcacacggacgtgcgcctgctgtggcaactgccgtgaaacgcctatggccggatcgtctcgttttcacataccagggtgacggtgacttggcttgtatcggcacagccgaaacgatccacgcattgaaccgtggcgagaatatcacgattatctttatcaacaatgcaatctacggtatgaccggcggacaaatggcgccgactacactggtgggaatgaaaagttccacttgtccttacggacgtgacgtcgagctccacggttatccgctgaaaattaccgaaatcgctacccaactggaaggaacagcttacgtaacccgccagtccgtacaatccgtaccggcgattcgtaaggcgaagaaagcgatccgtaaagcattcgagaattcaatgagcggtaaaggttctaacttagtggaaatcgtttctacttgtagctcaggctggaagatgactccggagaaggctaacaaatggatggaagaacatatgttcccattctatccgctaggtgatttaaaagataaagaataacgctaaaagtcaacagaacaatgaaagaagaaataattatagcaggattcggtggacaaggcgtattgtctatgggtaagatcctggcttattcggggctaatggaaggcaaagaagtaagctggatgccggcatacggtcccgaacaacgcggtggaacagccaacgttacagtaattgtaagcgacgacaaggtttcttcacccattttgagtaaatatgatactgctatcattctgaaccagccttcactcgaaaagtttgaaaataaggtgaagcccggtggtatcctgatttatgacggttacggaattatcaaccctcctacccgcaaggatatcaaggtatatcgtatcgatgccatggacgcagccaacgagatgaataacgccaaagcattcaacatgattgtacttggcggtttattaaaactccgcccgattgtgacattggaaaatgtaatcaagggattgaagaaaactcttccggaacgccatcaccacttgattccgatgaacgaagaagcaatcaagaaaggtatggaattaatccgtgaggtttaattaacagataatgtgcaatggataattgataattattagctacgtatagtacgtatgcaacataattttcaattatccattatcattaaatcaattaaagtaagtatctttgcctccaattatgagacgaatcttactattatatatattactttccgttgtagggctgacaactgtccatgcacagtttaatcccggtcgtcaacaaatcgacgaaaacggatatgaccaatacggtaaccaggtagaccctgcaatgattccggacagactggatagtgcaaacgttgaagtaaagggattaccacctaccttatatatgtggcggatcaaaaaccagctgggcgaccggacgataatccctgccgacaccgcctatcaccactttcagaacacgaatctcacggaaggaatcaccggacattacaattatctcgccaatatggggtcgccccgtatgtcacgcatcttctttgaccgccgttatccggagccgaccattttcatggaacctttttccagtttctttgtccgtcccacagaatttaattttacgaacagtaatgttccctataccaatctgacgtatcataaagccggtaataaggtaaatggagaagaacgtttcaaatcctacttctctgtaaacgtaaacaagaagttggccttcggtttcaacattgattatttatacggacggggatactacaacaatcagaatactgcatactttaacgctgcagttttcggtagctatatcggagacagatatcaggtgcaaggaatatacagtaacaactatctgaagactaatgaaaacggaggtatcaccgatgacagatatatcaccgctccggaggaaatggccgaaggacgaagggaatacgaatcaaccaacattcctactgtattgagcgaaacaaccaaccgtaatcatgacttttatgtattcctgactcaacgttataatctaggattcaaacgtgacattccgcaggctgaaaacgacacgactcccgccaaacaggagtttgtaccggtgacgagctttatacacaccattcaggtagaacgggcacgccatggcttcaattcttatgacgaagtagcggacggatattatcagaacacatattttgataaggacaataaagcgttcgtaagagacagtactacttatgtaggaatcaagaatacaatcggcatcgctttactggaaggtttcaacaaatatgcaaaagccggattgaccgcattcgcttcttacaaaatcagtaaatatacgctgatgaataaggacggaggaccattacccgacaaatacaatgagaacgagatattcgtcggaggagagttatccaaacgggaagggaatattcttcactatcacgcaatcggtgaagtgggacttgcaggaaaagcaatcggacagttcaatgtaaaaggagatatagacctgaatttcccgttatggaaagataccgtcagccttattgcccgcggtgaggtcagcaaccagcttgcacctttctatatgcgtcattaccattccaaacatttcatgtgggataatgatatggataaggagttccgtacacgtatcgaaggggaactaagtattgcacgctggaaaacccggctaagagcgggagtagaaaacatcaagaactatacgtatttcaaccaacaggcaacgcccgaacagaaaagcggaagccttcaagtattatcggcaagcctcaaccaggacttcaagctcggaatcttccatttagataatgaagtaacctggcagaaatccagtgaccagactgtgctgcccttgcccgatctttctttgtatcataacttttatatgcagtttaaattagcaaagaaagtgcttagcgtgcaattaggtgccgacgtgcgatatttcacgaaatacaatgcacccgcctatatgccggctatccaaaatttctacctgcaaccggaagaaggcaaagttgagataggcggttatccgattgtgaatgtctatgcaaacctgcatctgaaacgtacacgtttctatgtgatgatgtatcacgtgaaccaaggaataagcagacctgattattttctgtctcctcactatcctatcaatccacgcgtcctgaaattcggactttcatggaatttctatgattaacaaaacctttatggcttatggagacacgcccgaaactgagactattcagatatttagtgcctgttatcattatattggcacttattttcactttccgatattgcggaaaacaagaaaaacccttagggcatccgcgtgattatgccgccattgccaaagaaggaatactacgtgtagctaccgaatacaactcaatcagtttttatgtggacggtgacactatctccggcttccattatgaactgatacaggcctttgcccgtgataaaagactgaaagcagaaatcaccccagtcatgagtttcgaagaacggctgaaaggactgagtgaagggcgttatgatgttattgcttatggaatattggcgactagcaaattaaaagattccctgcttctcacctctcccattgtcctcaacaaacaagtcctggttcaacgcaaagagaatggagaaaacgattcactctatatccgtaaccaactggatttagcccggcgggcacttcatgtcgtaaaaggttcgccttctatcttgcgtattcagaacttaggaaatgaaatcggagacaccatttacataaaagaaatagaaaaatatggccccgaacaattgatttcactagtagcacacggagacattgactatgcagtttgtgacgaaagcattgcacgggcagtagcggattccttgtcgcagattgatatcaatacggctatcagcttcacacagttctactcatgggcagtcagcaagcaatcccccgttttactcgatagtttgaatacgtggctggataagttccaaaagaaatcagaatatcaaaagatttataaaaaatactataatcaataaagttgctcttgacaaaaaatagttttatctttgggctttgttaaaacagacacaataggtattacaattatgagtgaaaagataattaaatggggattcatcggttgcggcgaagtcaccaaaacgaaaagtggtcctgctttccaaaaagtagaacattcggaagtcgtagctgtaatgagtcgcgacggtgcaaaggcaaaagcctatgccaaagaaagaggtatcaagaaatggtatgacgacgcacaggaactgatagacgatccggaagtaaatgctatatatatcgccactcctccttcttctcatgctacttatgctattatggcaatgaaagcaggtaagcctgcatacattgaaaagccaatggcacagacatacgaagagtgtacccgtatcaaccgtatttcgcaagaaacaggcattccttgtttcgttgcttactaccgacgttatctcccgtacttccaaaaagtaaaagagcttgtagaaaacggttctatcggtaacgttatcaatgtacagatacgtttcgcacagccaccacgcgacctggactataaccgtgaaaatcttccctggcgtgtacaagcggacattgccggaggcggttacttctacgatcttgccccgcatcagatagatttattgcaggatatgttcggttgcattctcgaagcaaatggttacaagagcaaccgcggaggactttataccgccgaagataccttaagtgcctgcttccagttcgacaacggattggtaggtagcggctcctggtgtttcgtagcgcacgactcggcccgcgaggatcgtatagaaatcatcggagacaaaggaatgatttgtttttctgtcttcacctacgaacctatcggactgcataccgaacgcggacgcgaagaaatctgtatcggtaacccggaacatgtacaacagcctcttatccaagcggtggtagaccatctattaggtaaatccatctgttcctgcgacggtgaaagtgccacactgaccaactgggttatggacaagattctcggaaagctttaaacggatatttcctaccgttttatcagtattcaagatcccgaactttatccgttctctttcggcgtctgctggtactggtagaaaattaaaggaaatcgttccttggtatattgttagttttttctatctttgtagaaagatgttatttctgaaaagaagtaaataggataaaactaacaatattttttattgccatgactaaagaagaactaatgcggaaagcaatagagctttcaaaagaaaatgtcgaaaatggtggaggccctttcggtgctgttatcgccaccaaagatggagtgattatcgctaccggtgtaaaccgcgtcacaacgtcttgtgatcctactgcacatgccgaagttagtgcaatacgtgccgcagccgccaaactgggaacatttgatcttagcggatatgagatatacacctcctgcgaaccttgtcccatgtgcttgggtgctatttattgggcacgactggacaagatgtactacggtaacaacaaaaccgacgccaaaaatatcggttttgacgattcttttatctacgacgaactggaactgaaaccagaagacagaaaacttccctccgaaattttactacccaatgaagctattaccgcctttgaggcttgggcagccaaagaggataaaatagaatattagatttctcttttttattattaactaattaacaaccctgcaaatgaaaagaaaaaaccttctagtttttctaacagcagcatgcctgtttggttgtcaacaacaagacaacctgcaagaccccagtaaagaagctatcgacttctctacttctatcgacaaccaaagcatcactgacttgcttactcgtaacagtgccgctttatcgcttcccgtaaagaatagcttctcaactggagatgtaatctcaatgtcagtttccaatcaagactatcttccgtttgccctaggcgtagatagtcagacatgggacgagatagacacagacgttgaatctgttacattctatgctcattaccccgaattgactgacgaagctgctaccagagcattgggaaaacgttaccgcagtataaagggaggaaaagaacatctattcggaatagctcaagccattcgcggaactaaaaacgtagccttaaagttcaaacgaatgactgtacccgtcatcttacttgacgaggacggcagaccgtataacggtaaagcaagtatcaaacttcgtttgagaaacagaggtattcaagatctttttaacggaaaggttgagttggacaagagcgcggaagccgaggatatcaatatcaaaaaggtatctgacggagaattaaccaacttaatcccacaagaaacgatcaaagctggagaagtaattggagaagtatccatagagggagaaaaacaagaaatcgtagcaaatcaggatgttgaagtaagtgccggaaatgcgattgtcatgaggttcgcccgcaaccgtgtcatctttgacggacacactccattgcgtagataacgcagacaagtaaaaacgaacataaataaaaatccctggaactgccgtagacactcagcattcctgggatttttcacacacaaaagttattattgaaattgaaaactgttcttaattagtttagaagcgcatacctacggttaatagtacttgactacgtgtattagttactttagtggccggaggagttaccatagtccactcaccttgagttaactcaaattcattataaaatggataaaagttctctttatatgtagacaactgataagctaaatctgcataaaacatttttcctctatatcctattcctaatgtataattactctgtgatctcttattagaaaaatcagtatcagttataagagaattggaaggaatatatttcacagcctcatctctaaatacagcagaactataattatatcctaaacgaaaagcaaactctggaattaccttatactcagctccaatacggaatgtatgttcacctttcaaacagttctttacttcagcattctcaaattccatatccccaccgccatcattacttgaatacttaaatttcattgtagaataatcttcatattcatattccgcacctaatgctaaagaagttccgacagtatatcctaaactaacgttatatttccatggtgttaccaatcgataatcccgcttcatatctcctacataatcataggtatctacaattatacgttttaattcatcagtttttgcatctctataatcattggttactattgcactcgtagaatatgttaacttatagaaagttggggtatgcactgcaaaacctatacgaaatggagaatattcaaatggacgaaggattaatcccatttttacatcaaacccagaacctgagatattgttataactttcaagagaataaccttctcctcttttatatgattcatcatacccagaatatttatcataatccacatcataggccccaatggtcaatcctaaatatacacgatcatttatattaaaagatacattaaaatcatactgatcaattccccccttttctcttgaattaaaaacagaagaaggctctaccggcagaaaaggaacatataaatctggttcattatcaatccgatctctttctgtcagacctccttgataccccaaagccccaagccatccagcatcaggatctgagaatatcctatttgcattatcaaaatccaagtgctgcctagaattatcccaaacatatcgttctgcatcagttgcctgtaaagccatagaattagtttgagaaacataatatggagatcccggattactaggattctcaactactcccatcatccccgacatcgacatatttttataaaaagatttagaacgcttataattaaatccaaaatttacataacgtaatggagtctgattacctattttagtagcaaaaacaactcctatattatcaaacgaccatctattcttatctatagttgatttttgaccttcatatttactctccattccataagctgaataactaaatgaagtcattacatcattactccgatagataccaataccagcaggatttgtccccattgtagttatatctccacctaatgcccccatcgcaccacccattcctacaaaacgagctgtaccattcaaatctttatctgctattttgacaccatcatatacagattgtgcactaacggctcctatcacaaaagataaagtatatattactgttataatcttcttcataatctaaattaatcatattaatactatcttctaattatcttctactactcctactagaagaaccgcctcctgaacgggacgaactaccgccacctgaataactaccgccacttgaacgagaactgctactgctggctggagaataacttctagaagataaagaagaacggttactattatagttactacgagtgctttccctcgaataagtacgtgatggagaagcagaactacctctattatatgtcgaactggatcttcttgaagaaggagaatatgtagatgaactacgagcactacttccgcgggaactattataagaactagcacgagtagaggtgcgagtacttgtcccactactacgagtactacttggacgggtatatgtacttcttcttgaggaggatacatctgaacgagtagatactccagaacgtatggattcacttcttgaaccaactactcgccccgttgagacacgacctccagaaggtacgctagtagtcctacgtacttgcgaacgaccataatctgaacgacgagaagtagaagaactatatctactaggagcatatgaacggcgacccgtataagtgttgcgtgcccaatggcttccaccaccccagccccagctaggaccgccgtgccaatagtgatgatgtccccaatagccaccaccataccaaccaccccagtagccaccataccagccgccccaggaacccgggtaatatccccaagagtagtaaggacgattccagccccagccataattccaaccccagccgtaagaaccataacgccaatcccaccaaagcgggttactgaacgtcgggaatgcataagcatacatgccgtcggtatatacgttccagtcccaggaattcggtccgtaaactacgtcccaatataacgggctgctaatgctaatagcaaaacgcggattacggaaacggatgatacgttctgcgtactcataatcttcctgtgtaccgtcaaattcgccggtcacccattctccatccaaatccggattagatttttcttttatatataaggtatcattgtccattacgaactcattatcacgtgcatcgtaacggcgattatattcatccacatcccgtgtttttcccttacggtcctgaacaactacggtagtacccggtgaagtatagatgttggtcacctgttgtttcgtttccttcttaaccggagtttctttcttctcctgtttatctttggaaggtacgaagtaaaggtcgtcatcaacgctttgtgccagcaagcctatcggtaggcacaaggcaaatagcaagaagtaaacaatctttttcatatcatctcggtttatgtaattacttaaacttattcacattacaaagataaggaagagatttttcgtccgaaggagattttccccaaaggataatagggaaatccctatttctaactatcttagtagaagatacattgcaccttggcataaaattcaagtaaacttgattttctatacttggtttgtagtatctttgcatattatttaccagaaaataaaacaactatgaagtattttgagttcacgttccatacaagtccttgtaccgaaacagttaatgacgtactaactgcagtgctaggcgaagtgggattcgagagttttgttgaatgcgaaggcggactgaccgcatatatccaacaatcggtatgtgatgaaaacgctatcaaaactgtaatcgccgaatttcctctatccgatacggaaatcacctacacatttaccgaagcagaagacaaggactggaacgaggaatgggaaaagaatttcttccaaccgattattattggagaccgctgtgtaatccacagtacttttcaccagaatgtacccaaagcggaatatgacatcgtcatcaacccacaaatggccttcggtacgggacatcacgaaacgacaagcctcatcatcgaagaattactggacaacgaactgaaagataaatccttgctcgatatgggttgtgggacttctattttagctatcctggcacgtatgcggggggcacacccctgtacagccatcgacatcgatgaatggtgtgtacgcaattctatcgagaacattgaactgaatcatgtagacgaaatcgacgtttcacaaggagatgcttcatcacttaccggaaaagggccttttgacattatcatcgccaatatcaaccggaatatattattgaatgacatgaagcagtacattacctgcatgcatccaggttcagagctttatatgagtggattctatgtagatgatattgctgttatccgtgaagaagcggaaaaaaacggactggcttttgtacattacaaagagaagaaccgttgggcagaggtaaagtttatttatcaaggctaatcccctccaactgatttttcctaaaaaaacaatatccccatgtccggacatcacatataacaaaatgggaatgtcggacatagggatgtcacatataaagaaatttatgcgaactccttctttacttgctcacaccattccttgattttcttctttgcctgttcagactgattatccaaatcaatcaccaatccgcaccactgattacctcgtaaggctctggaacgttcgaaagtataaccttcagaagaagtgaagccgactaatgtagccccgtctccttcaaaaacttccgccaacaagccaataccatcggcaaagttttcaggatagcgtatctgatctccgagaccgaaaatagcaaccttttttcctttcagttccattgttcgaagctccggtaacagttcatcccaataagtaggcagctcaccgtcaaaccacgtggaagctccaacaataaaacaatcgtaagctgtaaaatcattctgccatgcctgttcaatcgctactacttctatcttatcttctccaaactctttctgaatcttctccgctacccagcttgttctttcagccttagtagcataaaataaacctatctttttcataatctgtacaatttaatattccaacaaattcttggcagcttcgtatatcttagcctcatccggcaatatttctttttccagaatcggattaaagccgacaggagtaaatgtagaaccgacacgttctaccggaccgtccaaatagcggaacatctcccctccaatcatagccgccagttccgcaccgaaaccggagaatactttatcttcgtgaacaaccaatgctttactggttttctttactgattcaaatatcgtttctttatccaacggaatcaaagaacgaatatcaatgacttctactttccagccaccttctttctccagccgttcggcagcgtgtaaacagaaatgggtagtgttgccataggtgataatactcaaatctgttccttcacgacggatacgtgcctttccgaaaggaacttcaaaatcttccggtacaacggctgctgcctccaccgagttatacaaagctttcggttcgagaaacaatgtaaagcccttggaacgcatactggtccgcaataatccggcggcatcatcagcaaaggaaggacagacaattcgtgctccgggcaaagttgtcaaagctccctctatattttgggaatggtataatcccccaccaatataaccaccggaagctagccgtaaagttatgttcggagcaaactttccattgctacgccaatactcatgtgtacattctacatattgttctacggcaggccagaaatagtcagcaaattccgccccttctatcacgacatggattttagggtcaaagcggctcattccgttagctgtacccacaatataatcttccgcaatcggtgcgctgaatacacgtgcatcaccaaactcctgctgcatacctttagtcacattaaacacaccgcctttttccttgtttgctacatcctgtccccagataaacgtatcggggttatgacggaattcggctttcaacgtttcgttaatggcgttcaccataaaagttttctctccttctgcctgatggataccttctttatacttttgaggctgataaggttcgggtatcacaaagtcatagatactcttgggatcaggatcgggagcagacaaggcctttcgattagcggctgataattctttctttgcatcagtctctatttgcagcaattcttcttccgtcaaacgtttatagcgaagcaacatccggcggaatttcatcaacgggtcagcttcttttacatattccagttcgttttcatccctgtacaaggtatgtttatccgaattagagtgggaaccgatacggacgcaattggcttgtacaattaccgggttacgagtggttatggcatattcccgagcttcggtcatagcgttcatcgagtcaaatacatcttttccattacaatagataattttcaggttcttgaaacctgagaagttctctgccactttccgattggccgtctgttcggatttcgggacggagataccgtaaccattatcctgtattacgaaaatcacaggaagacgctcgagactagcgccattgatggcttcatacacaaagccttcggaagtagccgattctccatgagaagttatggcaactcctttatgaccataatacaccatagctctggctacacctgccgcatggaggtcatgtgtccccgtagcagacgagatattttcgatgtgccatttcggttttgcgaagtgattagacatgtgccgcccgccactaccgggatcagtcgctttcgatataccattcaggataatttcttctgcagtcattccggcagaaagcacagtcagcatatcccggtaataagggaacagaaagtcttcgccgagagtaaaaacctgcccaatagccagttggattccgtcatgtcctgcataaggagcatggtaagaccaacctaacgattgcagcaaataggaaggggctttctcatccagagcacgtcccaatgtcatcagatgataccacttcttcaaggtttcaatatctgtattttttatatcatactttttcatagttaatgaactctttattaatgaaacaatcagttgaatcaacctttccagttctccagataatcggctatgaaatgcaggaagttaccacccagcataccgtctaccacccgatgatcgtaagacaaggaaagatacatcttatgacgaatagcaatcgtatcaccttccggtgtctccacaacagcaggtttcttttcaatgtatcccactcccagaatagctacttgaggctgatttataatcggcgtaccgaataagctcttgaatgtaccgaaattagtaatagtaaatgttccgccatcaatgtcttccggcatcaatttgttatctcttgcttttaatgccaatgaatcaatggcgactgccaatccgtttagattcaaatggtcggcatcatgcaccaccggaacaatcagatttccgtcattcaaggaaacagcgataccgacattgatgtgtttcttgaaaagaatattatatccgtctaccgatacattcagctgcggataagttaccagcgctttcgctaccgcttccgtaatcataggcatataggtcagcttcactccttcgtgacggaagaagacatccttattcttttcacgccaacggactagcttggttacatccacttccagcacattcgtaacatgtggagatactttctttgacataaccatgtggtcggcaataatccgacggacacggtccatttctttcatctctactccggacgtattgataggggcagatgattgaggtgtagcagtggaagccacagattgtacagcaggtaccggagatgactttggactcgctgaagcagcaggcataatagccgacggtgcatttgcagtcgaagttatgcctattgttgccggtttcggctcgctaacaagccctctctttttcctgtcaatataatcttttatatcttttttgctcaatcgtccttcatagccagtcccttgcagggtatccagttcttccttcggaatcttagcgtcccgtgccaattgaatcaccactggagagtaccaacgttcttcgacagcaacacccggtttcggcacttcattatgggatttctctttagtagtttcctgagaggagttcgattcattggaagtttcctgttcactagcactgtcaccgtccaaattaataacagcaacgacagtgcccaccgctaccgtatctccctctttacacaaaatctccattactttccccgctaccggagaaggtatttccgcactcactttggcagtgtttacttcaaaaagcacatcgtcttcctgaaccgactcacctacctttacagaccaagaaacaattgttccttcggttatactctcgcccaacttaggcatttttatttcgaatcttgacatagacagtaaatttattattcaaccttgacacattacaacaatacgttgaaatagaaagttttaagttaaagtatttttaaccggacatcaacggttacatatccattcttcacgaatgtacttctccgaacgaagccggttgacagcttccttctcctctacactgaaagaactgacggattgcgattcactgaaatattgaaaagcattttccttgaaatcatccacactccccgccggcaaatatctaccgatattagtaacctcactccgaatggaaggaacggcatatacggaagacaaagtgccgtcatgagctatcacatccggattcaataccttatttaatatcgtgaggtctgtatcataaagcagtgtgcaatgatataatactctgtctttatgtacacactgtgcactccccgatattttcaatccattcagatagatacccagccgttcatctcctttagcttctataccgatgaatgacagaaagtctaacgttcgctgaagataatgaacaaattcaggcaaacgcgaaactgtttctataaaagtaaaattgacattacccaaatcgtgatatactgcccctcctcccgagaagcgacgggcaatagctatccggtgctgtttcgcccattccttgtcaacttccgaccgaagacgctgatgtttccctatcacaacagaaggaacgctctgccaaagcataaaaacatcctccgttccctgcttcagcaaatactcttctgccgctaaatggaaataaatatcagtataaggactgtatatacatcgaatcataggtctcgaagataagggattaaaacattacttcgtgataaatctctccaaccgtcggatgcggaaatacggtcttctgaaattcttccagcgtatatcctctctgaatagcaatgcctgctatgacaatcaactccgacgccggatttcccagcatgtggcagccgatgattttgccctcttcatcttgaatcaatttacagagaccgttcccttgctcattctccgcaacgaatcgtccggaataagccattggtagtttcgtaacacgataagggagtccgagttttatcagttcttcctcagtcttacctactcctgccatttcgggattcgtataaacaattcccggcacacagtcgtagttcatccgatcttctactcccaatatatgattgatagcaacttctgcttcacgaatggcggtatgtgctaataaagaatatcctgtaatatctccgcaagcatataccctaggatgagtagtcagtaaatgttcatctactttcactccattccgatgtagctctatattcaattgttctaatcctacgttggataaatttgccttacgtcctacactaagcagtattttatccgtttcaatcgcagaagccttgcctcccttttcaatcacgaccctatcaggtttcacttccactactttagtatccagatagaaagaaactccccgctttgtatattccgtacgaagcataccactggtttccttatccatgactcccaatatttcaggcatcatttccacgatatgtaccttcactcccatactgttaaagaaagaagcaaattccattccaattactcccccaccgataattactaacgttttaggtagttcttttatctccaatgcctctttggaggtccagtaatcaacttccgccaatcccggtatcggaggaatcactgtatcggagccggtacataccagcagatactttacaaaatacgcctctccgtcacaaacaatgcgaatcaacccattttcttccccttctacaaaagcttctttctccacaatcgtaaccccgtaagaattgacagtcattttcacaccacccgtcagcattttcaccgttttatctttgcggctcataattttagataaatcaaaggaaggggattcggcaaacacgccatacttggaagcattcttaatgctatccagaattttagcagaatataacagagttttagtaggaatacacccttcattcaagcacaccccacctattgcttttttctcgaaaagaacggctttcagtccgttcgcccctgcccgttcggcggccgtatatccggcagggccacccccaataatagctatatcaaaattcataatcgtatatctttttaataataatacgattataacaaatgaaagaagaaattagttgttcagaaaaataatgcccgctatttaattgtcagttttttgaggtcctccaatgtaccgttaaatacattcaggtctacatcttccttaatgccgggtacattcccgacatcagtgtgttgccagaaattccatttaccctgatatttcaccgaatccacataataatgtgcaatccaataagggtaagcattgaaaatggaatcatccagataacgggttttaaatttataagaagtataaagaatgggcttcaccccataatgtgattctacgcggtccaaccagcgcttcaaaccttgttgcagttcttgtttttcctttcttccggtcacttccacatcaagcacgggaggtaagtcaccggtatccagttttaccgtacgaataaaaaagtcagcttgtttcaaagcatccgtaccagggatatagaaatgataagccccacgaataaagccatgattacgagcattggcaaaattcacctcaaatgtagtatcgttatggtcccccccttctgtcgctttcataaagacaaagtgtaaaggagtagccgcttgctggttccgctgaagtctctcccagtcaatttttccttgataatgagatatatcaataccatgaatatcatatccggaaggaatacaaactccatactcctttaaaccgttacaaggtttccaacgataggcataaggacgaatgaaaaaatagtagaagacagcagaaaaacaaccgacaatcatcactgtcagaatattacgcaaccagataggcatagcacgtccgtacttcccctgtacttttttcgaagcatggggagatttggaagaagaaacagttcttttttttctagtggtggaagcagcattcttcttttgaacggcagctatcggattattacgtgacggcaagtgtcttagtgattaaaaattagtgattggtgacaaatgaaaaaaaagcggcgaacagcaaccatacattctgcatggcatttactgttcaccgcttcatgtttatcgtttacttaccttgttccagctgtaaagtcttagttgcctgatcgcaaacttcagtaggaccaaagtactggattggtcccggatatacataatccgtttcgatagcccaacgatcacgttgtgcagcgaatgccttgaaaggagcaccatccagtttcaccaatgctttctgaataaccggtttcatttcaccgtgacgacgttccatattcatcatcattgtgataggtacaccaccagcaatccattcggcagcaggagcagttgtgttacgtacagaagacatataaccggtcttaccgttagcaatcaacatagaagctgtgtaacccaaagagtagcagtagtcagcgtcgaagtttgatggagcagcgcaacggccttcgtaaccgaagaagtggtgctgagcagcaaacttaccaacatacttaccttcttctttccatgcagccaatttagtagctaccatttcggacaacagtttttcagtttcaatcaatgatacctgaacgtttccgtgcgggtcacgatccaaagtcaactgacgtgcaacaccttccggcagacttgcatagatagcagagttttccggagaaagtttacgaatgatataatcacgttggtgagatttcttaatttgagcaaactcttctgcgttagcagccaggaagtcgttcaattcagcaatcagacgtttcatagccgggatgaattcgaccaatccttccggaatcaatactgtaccgaaattatgtccctgtgcagcacgatctgctaccactttagcgatataagtcactacatcatccaaagacatatcttttgcttctacttcttcagaaacgatacatacgttaggttgtacctgcaaagcacattccagcgcgatgtgagaagccgaacgccccatcaatttgatgaaatgccaatatttgcgggcagagttacagtcacgttgaatgttaccgattacttccgcataagtcttacaagcagtatcaaaaccgaaagaagtttcaatcatatcgttcttcaagtctccatcgatagttttcgggcaaccaattacctgtacaccgtatttcttagcagcatagtattcagccaacacacaagcatttgtattagaatcatcaccaccaatgataaccaatgctttaatgcccagttctttgataatttcaaatcctttttcaaattggctttcagtttccaatttcgtacgacctgaaccgatgatatcaaaaccacctgtattgcggtattcatcgataatgtcagcagtcaattccatatagttgtggtctaccagaccaccaggacctaaaatgaaaccatacaatttattatccgggttcaatttcttgataccgtcaaataaaccggagattacattgtgcccaccgggagcttgtccaccagaaaggatgacacccacgttcatagcaggaagagttacagcttcaccagcttcgaatgtaatcaacggcattccgtacgtgttagggaacaatgctttgatagcttcctgatcggctacagactgagtagcagcacctgctacagctttaacggctcctgatgccaatgctttcggaagtttgggctggtaagcagcccttgcgatttgcaatgcacttttagtcattttctttaattttttatttaaaggtgttagtaagtttcttcttaaacttgaaaagcgttgcaaatttcgcatttttccgtgaattataaaagaggaagcacaattttatttacgattccttattgtttccaacctccaccaagcgctttataaagctgtacgacggctatcaactcatcacgaatagcattacttaagccaatttgtgcatcaaagtatccacgttgggcatccaatacgtccagatagttaataaccccattaatatattggagctgtgccagatccatatagctcttagccgaacgttccaaattagcacgaagttcgtacacctcttttatcttgttaaaattcacaattgcgttacgtgtctctttaaaagctgtcagcacggatttctcatagttatgcacctcaccttcaaaagccgcttttttcgctttcaatgccgcacggttctttccccaaccaaagataggagtcaacaaagccccttccattactgcatacggagatttcaacaattctgacaatgaagtactctccgtaccaaaaccaccggtcagagcaagacgcggaaacatattcgtataggctactcctactttcgcattggcagcgatcaatttctgttctgcctgacggatatcaggacgacgttccaacaaagtggaaggcaagccaaccggaagtgtttccggaaaattaaattcctgaagcaaacgggaacgggcaatacggttaggatattcacctgcaagaaaagcaatatcgttttccttaagagaaatcttacgttctaaatccggaactaaagtagccgtacgtgccaactccacttgtgcctgacgataggaagtttcggaagtcaatcctccggcaaaacggatacgtgccaaacgaacaccttcttcacgagctttcaatgtttgcttaactatgtctaactctgtatccaatgctaccaattcatagtaagcttgtgctacttcggcaacaatcgtcatccggagtgcacgttgcgcctctatagattgcagatattcagcaatactggccgaacgcgcccaacgcagatttccccaaaggtcgagttcccatgaaacaagaaattgggcttcaaaagtgtctgctttcttaaacgcatcccctccatgattttccaattcacgttcagctgttacttttccttttatatccggaagcaaagctgcagtagagattcgtttttgtgcagccatttccttcacacgggcagccgctatcaacatatccttattatgctccaaagcacggtcaataaggctacagagagtggaatcagcataaatatctttccagtcctgatctccgaaactgacagaatcctgatgttgagccaaactatcaggtaaatgaaggtcaggacgaacgtagcttttccctaccttgcaggaagttaatattcctgcaaataataagatagccatatatagtttctttcgtttcattatttcttatgttttaaaattttcgactttgttttatacaccattacaaagaagaaaggcacgagaatgatgccaaatacaatagcaaatatcattccgaagaatactcccgtaccaatcgcctggcggcttgccgaaccaggaccgcttgccaataccattggaagcataccaagcacaaatgcaagcgaagtcatcagaatcggacgaaaacgtaatcttgccgcataaatagcagattgaatcaaatcttctcccttatccacctgcactttggcaaattctacaatcaaaatagcgttcttagccgccaatcccaccagcattactaagcctatttggaaataaacatcattttccaatccacatacccagacacccaaataggcacccaatgcagctaccggcaaagaaagcaatacagcaataggtactgtccaactttcatattgcgcagcaaggaaaaggaatacaaacaagaataccagtgccataaccatacctgtctgacctccagcttgcttttcctgataagaaagtccgctccattccaatccgatattatcaggtaggtgatcgcgggcaatctgttccatgatctccattgcttgtccggaactatatcctggtgcagcagctccacgaattaccgcagtagtaaacatattaaaacgcttgatacttcccggacctgtggtatatgatgcattgcctaaagaagtcagcggtaccattgccccattagacgcttttacaaagaatagattaatattatctttatgttcacggtaaggagcttccgcctggatatataccttatatatacggttgaacatattaaagtcattcacatacacagaacccgtataagctttcatggtagagaacacatctgccaaaggtacacccaacattttcaccttatcccggtccacatcaaaatatagttgcggaatttctgactgtaaagaagaagacaatcctgtcagttctttatgtttggaagcatagtacatcaaggtatcggtggcatctaccaaattatcaaaagtcgcttctccacgagcttccaactgcatctcaaaacctccggaactacccaatcccggtattaccggtggagtagacaagtagaccttacattccggatattctttgaggtgtttctctaccgtatccataattttttcgatgctggtattcttccgttcttcccatggtttcagaatcacagtcagttcagaacgagcctgattactaccgacacgcggactgctacccgtcacattctgaatatattctatataaggattcttttccaaataagctatggcacgttccgtcacaatacgggtacgctccaatgtagcgccttccggcaactcaagttcaattttaaaatatccctgatcttccaccggcaagaaactggtcggaataatacggtgaattaataggatagcgatcagaaccattccaaaagcacttaatacccgacgaggatgctttattgtacgggttacggcagctacatacttattactaccaacacctagccattcattgatcttccgaaaaataatattttttttctttccgctatccggcttcaatattaacgaacacatcacgggactcagtgtcaaagcaaccactgtagaaataagtacggacaccacgatagtcaccgtaaactgacgatacaactgtcccgtaattccactcaggaaactaaccggaacgaatactgcagccaacaccaatgaggtagcaatcaaagcgctggcaagtccgttcattgctttcttggtagcttcataaggacttagatgttccgtttccattatatgttccacaccttccaccaccacaatcgcatcatccacgacaataccaatagcaagaatcaatccgagtaatgtcaatatatttaacgagaaaccgaatattaacatgaatccgaaagtaccaatcaacgagataggaactgccacaatcggaatcaacgttgcacgccagctttgcaaagacagatataccaccaatactaccagcaccaatgcttcaaacaacgtcttatatacttcgtgaatagattcagagatataagtcgtcatatcaaatggaatctcataactcaatccttccggaaagttctcgctaatttcatccatagcctcttttactctctcggccacttccattgcgttagcacccggtaacatatagataccaagtacagcagcattctctccattgatcccactctctgtattataagaagaagcttccaacgacacgcgtgccacatcttttaatcggataatagaaccgttagcattggcacgtactacaatatcctcgaactgtccgacagtggaaagacgtccctgagtagtgataggaatagtaatatccaatccttccaccggttgctgtcctaatacacctgccgcagattcacggttctgatctttcaaagcattttgtaaatcctgtacggtcaacccaaaatttgccaacttatcgggttgtgcccatatctgcatggcgtaataacggctaccaatattagaaacgcgtcctactcccgggatacggcgaatcacatcaagcacattgattgtagcgaagttactcaaatagatttcatcaaacttcggatcagtagaagtcagacagagcgtcattaattgactaggagcctgtttttctactgaaataccattttgaatcacttctgccggaagacgggattcagctagcttcacacgattctgaatctcaactgccgccaaatccggatcagcagatacatcaaaagtaaccgttgccgagaaacctccagagttagagctatttgattccatataaagcatccccggtgtaccgttgatttcctgctcaatcggagtagctaccgcttgtgacacggtaagtgcgctggcacccggatatgaggcactgattttcactaccggaggcgtgatctgcggatattggtctaccggaagcattgtcagaccgataattccgacaatcactatcacaatagaaattacagccgagaaaaccggcctatctataaaaaaagtaactttcatctcttattctccttttgtgttatccttcatttctatcgaagtatttccagtttcagttgtagtgtcttttacttttgtttccggtgtactgattcgtactttcattcccggtgtcaatttatggaaaccttccactacaaccttctctccttccgccaaacctctttccactactacattatttccgacttccggtcctaattccacgaaacgtttttctaccgcgtcatctttacgcagagtataaatataagctccgcccttttcgatagtaacagctttcattggaacaacaagggctccttcgcgaacatccagcaacagctttactttcgtaaactgtcccggcaataatacttgtttgggattaggcatttccgcacgtacggagaaagtacccgtctgaggatctacctgaggttcagcaaaatcaacataacctttatgaggataaacggtattatctgctaaagtaatcgtaatattcggttgccaggaacgggtcgagtcttgctggcctaaattaatatttctttctttacttttcagataatcaagtgctgtcatactgaaatcgaccagtacggtatcacttttcacaatagtagcgagtagagattttcctccgggtcccaccaaggtacccaaatccacatttctttcactgatatgaccagacaatggcgaccggacaatggtatatcccagttccaattcagcctgcgccaagtccgcctcactcatggcgaccgtagcttcggcactttcataagcagcttcagcattgtccaagtccaactgacttgcagcattttgttcaaacaatggacgtatacgcttcaaatctcgttcagccttcaaagcctgtgcttcgtcttttttcaactgtgctctggccttgtcggcttttgcccgatattgatcctggttgattacaaacaaaacctgattcttattcacatacgtaccctctgcaaaaagcatattttccagataaccttccacccgggcacgtacttcgacgaactgttgggcacgaattcgtcccacatattccccgtatatctctacatcatcttttactaccggttcaacaatgactgtcggcatttccggcgtagccttctgaggtcgggtcaacatccaatacacgcccaacacaactaccgcacagattatagcagcaatggttctctttctcctcagtttcaattcatgtttcgaaaagaataatctcatatcgaatcttattatttaatttaacttatgtttgttatatccacatttatacaatttgcgtgccaaaatcactttgatcttttgttatctaataatcaaccatttatgtcattcacattctttcgtgagaatggggagtttagctgcaaagtgtagaattaatccacatttccgacttttggaacattttttttaattccgatttcaacaactaaacaaattatgccctacatttgtatttatatatacatcatcaacactagaccatgtcctaatgaaaaaacaaatcttctcaacattagttttatcaatgtgcctactattgcctttttccttatattctcaggagcaacgcaaaaaggtaggtgtagttttgagtggcggcggtgccaaaggaatggcgcatatcaaagcattaaaagtgatcgaagaagcgggtattcctatcgattacatagccggaactagtatgggagccattgtaggaggactctacgctattggttatactcccgagcaattggacagtatggttcgaaaacaaaactggacgtttctgttaagcgaccgtatcaaacgaagtgccatgtcattgaccgaccgtgaacggtcggaaaagttcattgtctccatacctttcaccaaaagtcccaaagatgcggcttcttcgggcggaattatcaaagggcaaaatcttgccaatctattttcagacctgactatgggctatcatgattctatcaactttgataaactccccatccctttcgcttgtgtagcagcaaatgttgtcaatggagaacaaattatattccacaacgggatcctgtcaactgccatgcgggccagtatggctatcccaggtgtatttacaccggtacgacaagacagtatggtattggtggacggtggaattgtaaataactatccggcagatgttgtaaaagctatgggagctgatgttatcatcggagtggacgtacaaaacgccttgaaaaaagcggataagctgaacagtgctcctgatatcttagggcaaatcgtagatattacctgccaatccaatcatgaaaagaatgtagaccttaccgatacttacattcgtgtaaacgtagacggttattcttcggctagttttactccggccgctattgacactttaatgcgaagaggagaagaagcagctaaagcacaatggaattccttactcgctttgaaaaagaagataggaatatccgataattatgttcccaaacgacatggtccgtattcttccctctccaatgtacgtacaatttatgtgacagacatatcattctccggtgtagaagctgacgacaagaaatggctaatgaaaaaatgcaacctgaaagaaaatagtaatattaccacccaacagatagaacaggcattatatcaattaagaggaagccaatcttattccagtgccagctatacgttgacggacactcccgaaggttatcacctcaatttcctactgcaagcaaagtatgaaaaaagaattaatctggggatccgtttcgattcggaagaaatagcctctttattaatcaatggaacggcagacctcaaaactcatattccttcccgactatctcttaccgggcgattagggaaacggtatgcggcgcgcattgactatacattagagcctatgcaacagcgcaacttcaatttttcgtatatgtttcagtataatgacatcaacatatatgaagaaggagaacgcgcctataacactacttacaaatatcatttagctgaatttggcttctcggatgtatggtataagaatttccgttttggtctcggattccgtttcgaatattataaatacaaagacttcttatttaagaagccggaatttatcggcttggatgtagaatcagaacacttccttagctattttgcacaagtgcactataacacatacgataaaggatatttcccctccaaaggaagtgatttcaaagccgcctactcactctataccgataatatggcgcaatacaatgaacaggccccattttccgcactgagtgcttcgtgggcaagtgtgattcctgccacccgccgtttttctatcattccgtcgatctatgggcgtgtcctgatagggaaaggaattccttatcccctgaaaaatgctatcggtggtgaagtatacggtttttatattccacaacagttgccttttgccggcgtaacaaacatggaattaatggaaaattctattatcattacttctctgaagttcaggcaacgtatgggaagtattcattacctcaccctgacaggcaactacggtttgacggacagtcacttcttcgaaatactgaaaggcaaacaattgttcggcatcagcgcaggttatggaatggatagcgttttcggtcctctggaaatatcattgggatattccaatcagactgataaaggaagctgctttgtgaatctgggatattatttctgattccaatcttttataatttaaactttatactatacaaatttttcccgcttctgtaaattcagcagaccgatcatcatccagatcagactggaggagaaaagaaatatacgatttttgataagaatcccttcccatatcatcggatgaaaattatcaggcacacggaagggattcagcaaaatattccaaaatgaacgttctatgctattcatattactgaaaaacatcagtacaatgccaatgataatcataagtacagccgttccgtttccactccgggtaatcgtagaaaacataaaagtcaaattaccaaaaaaaagaaccggaaacatcaactgcaaagacatctcaaaaggattgattggatacagcaataagatagcgatgtacgaaaagacgattagaatagcaaaaataaccacgtaaatcatgagtaaccgtactccccatactttataccgatagtcaggaataccaaaaagtatttccaatatccggctgtcttcgtcattttgaatgccgaagacagccgggtagaatatcagcaataaacatgggaacatgagtatattatagataagcccttcattaatttctgcccggttccacgcactctgaaacataaaaaaggcaaagaatccaaatgccgctaacagaaaccaaaagaactttccggcaaaaataatcttcaaattatattttaccaccttaggcagcagctttattaattgattaaatgtcatatcattcttttcttttaattcatattcttcaataggcagagataagcatcttccagattggcctcaacttcttcggctccttcgtatggttgctcaacagaaagataacgaacacggatagtatccccttgctggatatgatgtatgaccaaagatttatccaatgccttttcaaactccgttttatctatattaaactgccatacctttccattagccatttccaccatgtccgccggatcaccgaaatatttcagttcacccttgtttattaccacaacctgattacaggaactggatatatcttcaatgatatgagtagaaaaaatgaccacacgatctttactcaattccaccaacagattacgaaaacggatacgctcacgagggtcgagtcctgctgtcggctcatctactaccagaatacgtggcaaatggagcaaaatcaatgcaatgccgatccgctgtttcatacctcccgagaaagaaccgatattttcatctttccgctcatacatatgtaccgcattcaaaacatactctaaccgttccttacgcaaatcctcatctattattcctttcagtatagcctgataatcaagaaactcccaagatgtcatattttcgtaagtgccaaattcctgcggaaggaatcctatcaagctttgcaattcttccctatagatacgggtatccataccattaatccagatactgccataactctgctcgaatatgccacaaatcacgcgcatcaaagttgactttccggctccgttcggtcccaggagtccgaacatacctgtctgaatctcaaacgaaactccacgcaatgctttaaaaggtttacgttgttttccaatcaaaggaacactctttaccatacggaagtaagagcggcgaagtccggcaaatcgtccggtaacacgttctatatttacattatgttcatatagatactgtgaggtaacgtagatagcaatacccgcaaaccacaacagcccaatcattaccaccaaaccgttattatccagtcgcttgaacagttcgaacaagataacaggaggaagtccccagaatatcatacggtttactgcctttactcccttactattttcgtaacgataatataaataagaacgtatttttctccacaagtacaaagccgatgcataaatagcaaacgaaaacagaaatatccaaagtctattttgaataaaaaaataagtaaaataaacaccgaacgctaacataccgaattgccacaacacattgacaaagtcttttagagaatgatattcacgactcattcccagccttttccgtatttgcagaccactatgccattgacgactgatacgtcccggccaatcatatatcttaaccagattccggacagatatgtgtatttcttcattcggatctatgactttcgatttagctcttctaagactagtctgtgtaaaataagtcagtcctggtatacccgcaatcaatgctactaaatagatagactgccaaagtattccttcagcatatagccagatactgacaacgccaactacaaaaagaacaaaatggaaaatccacattttacgagacaaagaacgataccaccaaagcacattttccaatcccatgcagacagtaggaatcaaaatcaacgtcaataaggcagagaaaagaagtccaccaatcactgtaatagcaaaaggcgccccaatggctccggcatattccgtatctcccatggccaacggcaacatagcggcgatcgttgtgatagaagttatcaaaatcggacggatacgtgacattccggcagtcattaatgcccgattccggcgatatcctcttttacgtaaaatattagcatagtctataaggataattccgttatttacgactactcccagcagaatcaagaaccccgtcagcgtatttgcattcatcaggctattgctcgaaagcaataacgccagcaaagagccgatagcagcaagcggaatagtaaaaagtaatacaaaaggagttactacagactcaaaaacagaagcaagtatcataaaaatcaaaatgaaggctgccagaataagaaatttgaaatctccaaactgatcctcctcatggaatacttgcaaggcaacgcctgaaggtagattataaccggcaatcaattggtctatatcagaacgataacttcccaataattcctttgaggactgcacatctcttgagaaattataataaacttcaagttgtttatcctgattgacacgtatgatccgcgaacgtccgcgaccataattaatagaggctatatcttccagattgtgcattccaccctttgcattttctatccgaacagcacgcaaatcatcaactgtcttttctttttgaaccttctcctccgcttcttcttccgtctctgtactttttttcaaaatttcatcgcgaatgataatgtcataattatcttctcccactttaaaagtcacttcagaagaaaactcgttattgagtgccgttaatcccgaagttatattagcacgattgatatcataagtagtcagcagaatcgggtcaaagttcagatttatctctggctgacgaggagtatacgatacatgagtatgttgcacaaattcctgttcatccagtaggtagcggatttcctcagctaccatttgcatcatttcgaaatcagaacctctgacaaccactcgttcattattatcaccaatacccagtaaacgcataaagcctccaagactactcaataccgaattttcctgtccacctcccatagcatcagagacatagacttccgccccattaatgttcgagactttggattgcacatccgatttgatgtccgtaatttttcgtttacctatcttttgataatctttttgcaaaacgagcgtaatagttgcttctttctcccggacacggcagatcaaatctttcttttctgggaaattcttcagacgttcttccagcactttgactatcttgtccgtattctcaagggtacttccggtaggcattacaacacttatattaaaccgatccgaatccacttctttcatctgctgcacattcaaggtcagtgataatatcagagtagcaaaaagtaaaatcaccgctccgaatatagtgactcccggattacgcatacacgtcttcagtaaaaccagatacacttgtatcggacgttgaataatcgacaccttctcataaacgacacttcttcctttcttctttttcagaataacataagtgaccataggaatgaaaagcaaagccacaaacaaggaaatagtcagcgtagatataatagacaccccgatatgatgccctatcagtttaatcaggaaattatctgaaaagacaaacggcaggaaaacagtgacagtagtcaacgtagctgctacaatagagcgccacacctctttagtgccctgagtaactgagcgctcgggtgtgtagccgcttccggataaacgataaatattctccagcactacaacactattatccagtagcatcccaatggcaagtgccattcccactaatgtaaggctattgatagtaatgccggaagcatagaagaaattgaaggccgtataaactgagatcggaattgaaagtgcgataaagaacaccagccgcatatttttcaaaaaaagccagagaatgaaaacagccaacaatccaccgaccaatgccaggttaatgatttgattgatgttattctccatcgtttcagccttattctcctgaacgactatttccagatcaagcggaactattttttcattcagtttgtcaatcgcatcagaaacacggtgggaaagctctataagatttgcctgcgaatcatttatcaataccacagaaacagcctctttcccatttacacgactataagtggtttcatctttcagatcaaagaatacggttgccacatctttcaacaagacaggtccgggagccaccacaatattttccaggtcagatactttcgtatacatcgcatttacgtgaacaaaaatcttactatccggctcattggcaaaaccgacaaacgttttctcctgcgtattctgtgaaagcagattacttatctttgacgccgtaaggttcaacgctttgcacacctccgaatggagacgtatctcaatcgctttttgccgtccgccatatatattgacagatgccacaccatctatgttctccaaatcggaaagaatattatcctccactaagttcctgacacggtctgtccctcccgaaccccgtacctgaagtaccataaagttattgttcatctgtgcaatatcaactttctgtacctgcacagtaaaaccactgggaaaagatgctgccacttcattcaccttttcctgcaacttaagagcagtcatcttgaaattgacattcttcttaaaatcaatttgtatgttcgattgcctcctgtctatataagattgcagtttgtctactcctcctatcgtactgacagctccttcaagcggaattatcacttccgactccacatacgaagggtccatatcctgctgcgacgacacttggataaacaataccggaagctctgcattaggcagcaactctaccggaagctgtttgtaggacacatagcccaaaagactaagtgcaataaacagcatacagatcgtaattctcctatttagtaaaaagttcatcttcagctttttttagttcggtgatttatacgcctttttatcttttcaaggacataatatacacatgggataaccatcaaactcatcaaagtagaagttatcagtcctccaatcacagcaatagccattggcgaacgaagtgaagcaccttcaccaaatccgaatgtcattggaagcatagccagaatcgtagtcaacgtagtcattatgataggacggatacgttgctgtcctgcttctacaatggcgtcagtcaactccattcctgcctggctaagttggttgatacggtctaccagaataatagagttattaacggcaatacctcccaacatcacgataccgataactcccatcatattaatcgtggttccagtaatgaagaaaagcaagatagcacccaccacagccagcggaatagtcagcagaatcgtaaaaggatgtaacaacgattcaaactgtgaagccatgaccatataaacaagtacaacagaaagcaataaagcaaacaataagctatgcatagactcctgccgtttttcttcttctccggtcactgtgatactataattagcaggcaaatcaatatctttaacagccaaacacacttctgccgtcactttatcaagtgatttgccagtgtccatattagccattattttacctatacggctctgattgcgacgtagaatctctttaggtgcctgcccatgagtaatactagcgatctcgtccaacaaaaactcttgtgtaccacttctgataacaagtgatccgagagctcctaaagatatatccggtactttaatcacgatatcacgcatctcaccgcgatactccattttaccggcttccttaccactcaactgttgtttcaactgttcaatcactgtagcaacactcagattattgatcccggctatggtacggtctattgaaatcacgacttccggagcaccgtcttcaatagaagttacaacgtcatacaccccatccacttcctgcattctttcctttacttctccggtaatcttcgctatttcgtccaattcctctcctttcacttccactacaataggagctccttcactacccaacagagaactcaaagaattttcatcctgacggatagataattccagaccaacgggattcttcgcttcttcaaggaaccgggcaattacattttctggagaaagaatacactccggagaaagaataattttcatcatcgccgtattttctccttcaaatatggcattttccgaaccgcttccctctccgacatgactatatatcgtacacagagaatcgcctccgacaatagtatataataaatcttcgagattacccacagccgcagcagtacgttccatttgcgtaccttcaggcattttcacaacagcagtaaaagccttactttccgccctcggcataaactccgtaccaatgaacggagtcagcaaacctgtaactacaagtaataacactgccataccaattacccaccaacgatgtcgaaccaacttgcgaagtatcttgctatatctagtaatacggattgatttcacttcttccatttttactttcttgccggaaagttgagtatataacatcggaatcactaggatagcaacaaacaaggaagatacaagtgagaaagtaactgtccaagcctgatctttaaacagttcacccgaagctccatgaagataaacaatcggaagaaataccacaatagtcgtcaaagtagaagcaataaccgcatttgccacctccgcagttccggtaaccactgcctccttaacactcactcctttttcctgattccggaaaatactttctataactacaatggcattatctaccagcatacccgctccgagagccaaccctcccaaagtcataatattcagcgtaagcccattgaaaaacatcaaattgaaagttgctacaatagagattggaatagaaagactgacaatcaacgttgttcccattcgacgaaggaatacaaacaatacaatgacagcaaggacaatacccaatatagcactgcttttcacttcaccgatagcactttttataaaagtcccctgattggagattacctgaaaatgatagccgggcaaagcatcttctatcactgccaaccgactagttacttcgtctaccaccttcaccgtattgaaacgcatttccttataaatagacaaaccgatactacgttttccattaatacgtacaatgttttcgggacgtgcattcacaaactgcacagtagctacttctttcaaaaagacgggagccttgttgacatctgtcacagtttcagaagaactattccctgaagtctcctgctgtaccggtttatatccgacgatcaaattttcaaaatcggcttctgtggaaaacagactcgaacttttcactaaatactgcaatcccaattcacttacccgtcctccggatatgctctgattattagactcaatacgcgaagcgatatcctctatctttaattggaaagcatttaatttataaggatcagtctgaacggtaagggtagtcacttcctctcccgaaagagtcacttcggcaacaccttccaggcgaatcagctcgttacggatataactttccgcaatccttcgcaattccgccatatccgtaatattctgatgagacatccccaccaggacaactggcgacagattcgcgtcgtgttgcgttatttttagttccgtaatctccttattctgggcaaacggattcatagctttctgcaaatcgagaaaagcttcatccatatcctttgtccaagtatattctacggtaatccgtgccgttcccgctttaatcaccgaagacacctgtgtaacgtcactctgccgaatggccatggattccatgtttttcacaaattgtttttcgatctcttcaggaggacgttctcctacctttagttcgataaacaagcggggattattcagatcaggcaataagtcgacactcaactgatcgtatgacacctttcccaacaataagagggcaaatacaatcatacaaattgtaaccggattgcctactgcaaatttgactatattcttcataagtatttcctattttcaaaaggcacgtttattcgtcatacgaataatttacttttgaatttttactttagcatcttccttcaatgtttcaaaccccttcactaccagattgtcatttactttgagtccggatatgatttcaatgttatattcatcctctaagcctgtttctaaattacgtatctttgcggtattcttctcaacgacatatacatatttgcgacgacggttcgacagaatcacgtccttggggataataatggagctgtctgctctgtctaccacaatatctgctttagcaaacatacccggacgcaattttagttgattgttatcaactaaaacctttcctttataggtacgcgtttccgaactgattgcgggagataattcgctgattttccctctcaaagtatcacccggtatggtgtaatgagtaatatataccggttgtgcttccttgacatagcggatgctgctctccggcagattgatatccatatacattttatcataagccattagacttactaccggcttaccctgctctaccctgatatcagttgtataatggggcaggtcaacaatcacaccatcaaacggagcttttaccttcattttctccaaattgagttgtgcgttttcataatcataacgggcattcgtcaccttaacttccgtattccgcatctcactcatcgtcacccctcccttttcataaagcgctttttgtttcgattgctcctgttcggctatttcgagactgagctttttagcgtcgatagcaatgccgttttcatattctttgtcttccaaccggacaattatcgtacctttactcaccctatctcccattttgaaagtttttcctgtcttcggattaatttgaagtttataaaagccgctcatttcagagttcagagacaccccataagtaggctgtactgttcctgttgtatttatcagtttactgatcgaaccttttttcagttcgacaacagataccggagtagcaatgttattgggtgcgttttgtggtctgtcaccacagcttgtcaagcctatagttgctaataaagaaaatgctattaaaatgtgatactgtttcatggtctgcttattttttatcgattatatctttcatcggaacaataggaatattcttgtcgaagtcatacaatgaaagaattttaagattaagtaattctattctgtagttgattaatgcttgcgtataagtgattttcttatttgaaagttgtgtctggaactgactcatttccataccggtaatatcgccttcccgataacgtgtctggttcagatcataagttaattgagcattttgcacattctgctcggcaattttgatctgagtacggagattctcaagactacgccatacctgacggatattcagttcaatatctaccttttcttcatgaaattcaagttcattaatttgttgtgcaaccttttgtgctttgattcgtgctctcttttccccccaatcgaatataggaacagtaaaactgatagaaacacgcggattttgtgtcggattattaaacattttattcaaatgacggttatctcccattaatccgaatgacaaagagatatcccctttgaactcattcaatgcttttgtcttaatcatttcaaactcaagttctttactttctatttcacgctgacgaagttccaaccgtgagcctaatccatgtgtgatagcttgttccaaatctacttgaataggtttaatatcaacttcggcaaatactaaaatatcctcatccaatctcattccaagtgtttgtttcaacttatctttcgcattttccaaactcaccttactctcgtctaccgacgaacgagctgtcgctagattcaactcagcctgaaaaagttcgtctttggctgctaaatccgcttctaccttattttttataatatcatagctttgctgggcattgattagttcctcacggctgatttccaaattactttgcgccatataaacagcataaaattggtctgttatacttttttccgtattcaaccgctgcagagcataactaatatcagcattttcataatcatattcaatctgtttcaattccattttccgcttgttgtaagtgaagataggttgagtcaattgcaaatagaggtcattgctgaatgcccggtcgctggttttattcccttccaaaatggaattattgtcttgccaaccgaacttgttgattaacgaaatcgtaccgtccgtccataagatgggttgctcaatttgaaaagtcccactactgttgagcgtttcattagtataccattgcgacagccggttatcgaaacgcctgtttttgttataatctaacggattcaggtttaacgagaaccgcgatttcaacgaagccttctgagcaatcaggttctgtttatacctttccaaattcatataggaacggcggagagaaggactgttttcctgcgcaatttccatagccttgtcaatcgttaagggaatttgcccttgcgagggtaatgtaattcccatgaaaacaacaattgccagtagcattctttttaatagtagtaagtcaatttgcatatagtttgctgttttaattaatatcgtttcactattttcactgcgtcggctgttacagaccgcagtttacattcatctgtcagtaccacccggatcgtatctgagtcaaagtagtaactacccagttgttcccacccctcatttgcttttctcaggttaacataggcatcttctacctcactgccatactttactttaaaatgatattccccctgaagattattgttccaacgaagttcatcatccttgaatacatgataatacaagtcatactgaccgacttccggtacaggtactttccatgtagcagtctggctgccgtccccacttttaatcacaaaagccgaacgaatatattttccataatatctgtcattggtagtagccgtccattgtaaaggtggacgccaccaggatatacccgaatatttaaaaggtgtttcctccacttcgtccaaccacttaggcaagagccccacaatgggaggagcggaaagaataaaaagagtagaatcttcattatccacaataatttcccccggcaaatcgaacgaagattccggcaatatataaatactgtctttgactattttgtttcgttcctgtttgacattatttatgtcttgactaattatattcggaagattccccgaaaccatagtattaatctcaacattacggatctgatcttcccaaaccgaaacaaattccttactggtatgagcaggcatctctatttttgttttggctctggggtcttccaaaggctgataccaccaaccgtctttacgaatatccatgtgaataatcccatcataatccgaattattacttatcagcattttcaatacaaaaaattcttctccacccttattggtaattttagtcaatgttggttcccctaacgagtaaaaaggaagaggtgttgttttttcccattctcccaacaatgaacgaatatctgtccgacttatctctcccaatgtgtcgagcatattttcaaactttatattcaaaaaagtattacgtttcagcaatgaatataatgagtccctaaaggcttctacgcccatatttatttctgccctggcaaaaagacggcttgcttcctgtccgacgatattattctgcaagttgcgcagttccatatcgaccagcaattctttaaatgtacgcttctccagcaacagaacagccttttcattattactaataccattaatctggcgctcccaacctccattctctgattttttttgcaaatacaactcaatcactcggttggcaacaggccattccgaagaaaaaatattataccggaaattatagatttgtggaaaaagaaaataaggatttgcctctgacgaaagattaccttttcccctgctaccggatgaaaaattataatttccttccgtttgcgcaaatctccagataaaattattgaacgtacgcatctgtgcttcctgcaaactgatttcattcctgtctccatatctcgaccaacgtatatggttttgaacctgtttcttcatatccatatcatcaaacaatgcccctttttccggaaataagaccatttccggttgcacggtttcctgtgcttgcgaccaagcacgttcataacccacaaattgtattggtacttctatcaacgaaaaccgtttgaaaggataatccaatttatagtttcgagccagttggtctttaacattacgtattaatgaagggatcgtatcgtggatagaatccaaagctgccgaaaaaaagtcatgtcctttcagatgccagatactatataggatgctgtctgcagatatacttttctgctgataatctcctatggccagtgatattgtttgagacggaaaatctcccttaaacgtataaaccccatgttcatcgctcttaccttcgccttgggaaagcggaaccaaccctgctagaggcttcactttcaaatggtaattgctgaaataagtttgttgccagtccggattttcatcactataaccagttccggcacgaggataccaatatgtttcgggagtaagcaataaataatcctttgtctggaaacagtattgtttatcaatattgaacagaaatttctttttagaagcctgtaacacttccggaggaatatccagataacaaaacgaattatctatttgtccatcatacttaaatgtcactgaggcagtgtctccctttgccagattcgtaccgaaatccactaatacgatttgcttgtcacgcttgaatttaagtggttgtccatccgaatcaacggaacgtacggtcagccccggattcaggcaaaacgtaaatacggcagacgagtccaaagctacccccctcatggttacttcggatagaaagtcatcaagacgttgttctatcgaaaaatcatattgatgaataaacagcttcggagtagcgacatattggttgttaacacgtgtatatgcagcccgtatatcgccctgatacaaaatggaatgcacatgccaatatccgcaagctaaactcagcaagagtgtacacacagaaagaaagacccatggataattgctacgcgacgagtgaggcagacgccggaatagagagatagtgaaaaagacaaatgccaggccggcgagaaaatagatagcccggtgattcaaaattacttcccaattggaaaatccaacaatagtagattttactaatgggagactatacgccatataatcgaaaaggtaataaaacttatcctcaatataaaaaacagtcaatccgatataccccaacagaataacaaaagtgagtgcctgattcttcagcaccaacatcagaaagatagacaggccaataataaaaacgagcgtaggtacactaatcagcagaaaatataataaataagctatccagtccacttctcccactgtcagattgaatgccattgtaatgcccataataataagattgagcagcagaaaaacacgcagattcccccagatcttaccaatcacgtactcggcattacttaacggacggacataaaagacttccgacgtatccagtttcttgtcccttttcagaaaatcagaggcaagaaaaatagcaatgacagcctgtcctgtattcagcaatagcagaattagataaggtatattcgacggaatggacatagcaatccaaaatccgtaagtatcctccgatacaaataggagaaaattaaaaagagtagtgatacctatggcgagcactgtaaacacccggaagaaccaacttcttattaataacttgctttcatactttgctaccgattgtatattagataaaaaggtcatatcagcatatcgtgtttagtcgtttgtccaaaggtttaattgattctccatataatatacataggcgtgttcaagattaggaggaaatggctccgcttcgtatccttctactttatcggcaaccacctgtacctcccaagctgtccctgagggaatagtagatatgaccggatattttttatcaatctcatgcaattgatcgccaccagctctgatcctccacaccttgccttcggctttcttcaacatatcatgcggagacccatagaaagaaacttccccccggttcatcaacgccatattgttacaagtactggagatatctcctacaatatgggtagataaaataatagtgacgtcattttcactaacttcggaaagaaggttacggaaacgaatacgttcttcggggtcaagcccggtagtaggttcatctacaataattactttaggatgatgtatcaatgcctgcgcaattcccaaccgacgcttcatacctcctgataatttgttagcataccgctcacgtacatcaaacaatcctacattttcgagcatttcatccacagcctgctttctttgcctgttttgagtcattcccgacagacgggctgcatagtccaaaaactcatacgttttatatttggcaaagaaacgaaagtcctgagggagatatcctaaaataccacgaatttctttccgttgtttccactactgtcccgtaaaagtggataattagttctttgaaattattgaaatatagtcaattacgcggttttttaaaatgaaacggacttgattttgcaactttgcagtctaatacaaatggctgctatgttccaagacaaatacgtattctctcaattaaccgcttttctgaacaggactcagttcaacaactatgttcgcaagtatgatggcaacagatatgtgaaacatttcacttgctggaatcagatgctcgcgatgatgtttggacaactgagtaaccgtgaaagcctgcgagacttaatcgttgctttcgaggcgcatagggccaagcaatatcatcttggtttaggtcgtgaaccgatagccaaaacaactcttgcgacagccaaccagaaccgtgattacagaatcttcgaagactttgcattctatatgatgaaggaagcctgcgagaagcggacgaccaacatccttgacatttccggaaagaaatatgcgtttgattcaacaacgattccgttgtgtcttgcaacattcccatgggcaaagttccgaagcaagaaaggaggggtgaaagctcatgtcttatacgacattgaagcacaagttcctgctttctataccgtaaccactgcttcaaagcatgattccacagcaatgtcttcaatccattatgaaccaaatgcttattatatattcgacagggcttatgactcctttaaagaactctataggatacatcttacagactctttctttgttgtcagagccaagacaaacttaaagtataagacagtcaaatggaagcgaagaatgccaaagaacataatgacagatgcggaagtgaaactgaccggatatctctccgagaaaaaatatcctgagtcattcagactcgtccgatattacgacgaagaggatgaccgtgagttcactttcttgacgaatgcaaaacaactttctgcactggatgtcgccaatctttataagaaaagatggttaatcgagctgttcttcaaatggctcaagcagcatctcaagataaagaaattctggggcacaacagagaacgctgttcgcatacaaatcagtgtggctattatcacgtactgtcttgtggctattgtccaacatgatatgaagttgaaacgttcaacctatgaagttttgcaaattctcagcatatcattgactgacaaaacccacttgcgtgacctgttcgacaagactaatttcaatgatgtcaaagatctaaatgatcccctgattccggggctttttgattaattgtttaactcgtcccattttaacgggacactaatgcgttgtttcatcaaatcgtatccacagatttcaacctgtccggaagttggctccattagagctaccagaatacgcattaaagtagatttgccggcaccgttgggacccaataagccaaacatccccgtaggaatctccagattgacatctttcaatgcatggtttccatttggataaatcttattgaggtttttaatagttatgctcatgacattttgttaagcctatgttgtattggctgataaagatagggtttatttatattacaagaagcacaattgtaaagattaacttatattagcagtcaatagaagatactggattcattcaaatgcaaaagaggaagccgcttcacagtgacctcctctctctatactctatatgaatatgccccaaagggtttattaaaaaaggaacatacacaaaagggttttatcttaaaaaattaattattaaaaacttattctactgacttcaatcagacagataacatcaaaatcatatcaacgatcttcacagacagttgatattaaggggaaatgtgcatcaaaataaaatctgatgcgtaagctagattagataagatgtacctctgtacttttcctaaccagcatagtaaagtagggattcacacgctacgaataaatctaagcccctactatatatctcaaataaatatcttagatactacctcccttaccaccgctgtgagtaggattataagttaccgtcttatattgctgatcagcacctgtataacgtatcgcagagacagatattgttttttcgcttccgccatacactactgttgtagataatgtagttttacgagtcttggcataacaagtatagttcatctcagtataaccatttacattcactgtattgtatgtacgttcagtttcggttactccagatgttgttcccattaatgagtacatacgagttttaagataagcagccattgcgtttagtgtattttcgggaacgctacttcctaatgcttcttttatagcctcaactacacctctacctttttcgtaatcccaacctgttttttctttatacttcaacacgatacctgtcaaggcctttgcattctcgctattgtcacgactttcctgtccaaggatttcgtctttctgaattacttctttttctactttactatttacttgattctctatagcataagcagagaagtgtgtaacaggagctttataattagcctcacccactgtaacttcagcagcctgtacttcccattccccgttatccggattcagataggaaagttgcatagttgctttagggaaagttacccccggaataggattaggaatagaaatatttacaggttcgctaaactgcaaacctgtcggctgaaattgagcagcagccaaaggtatactttttacagcttctacgacctcagtaggcttaacttcagtaacaacctctttaggagcaggaacaaacgtagttacactgatatcaactttaccgtttttcacaagggtcggatcctcctgcgcatcttctttaattacacctgccgggatcacaatttccactttcgcaagaggcatatcttcaacaactttgtccggctcaacctgtccaaagtcttctgtggttgtaggaatcgcctcatttgatgtactttcatcctctacagtaattggatctgtcatttcatccaataccacttcttttaccggacttacttccgtcaaggcaaaagcaacttttactacactacgattctcagcattatcagcaattttcacagaagttttctgagaaagataaccattaggagcaacagaaacctcataagttcccgtattactttccgttacagaaaactcacctttcgaatccgttatacaatctttatcgccaactttcacttttaccccactttttccttcaccttttacagttacagcacctttaatgtaatactctaccaccggtttcggagtttcaattacttctccttctgctggtttaggatcgtcatcatcgtcatgacatgcaactgtagcaaaagacaacataccaaaggctatcgccatggcactcacatacatccattttacacttttcataatgtttcaaatttgttaaaatacttattcatatcaatcatgttcaattctcactcgtcctaattaaataatagcgaatatgatccggttgccagaaacgtgaattctcgacagacctaggctcggtattataactttcccccaaagaacggtgggcgtattcattcccactacgcatatcatactgaaaagcaaaatattcgggaagcataatccgcaatgcatgccgtttgcgtttcttccccggcaacggaatagagaagttaaaccctgcattctttgccccgtccgtatacataccatatatacccacaatatattcgccgaaataacgtgaaagcgttccgcgtattccataatctccataaataaaacgggatccttccaccttcaccagcgtgttcacttccggcacataatatcccacactaagccgtccattgattcttttccacttactcatctcccacttgctaccgtagaaatgagaagaaccggtaattcctccttcaccttctaccgtccaccgaccatttgcagaaaaataaccgactcccgcagcaactcccatacgatcatctgagaaattaccgcctgtcaggtatcctttccaatgattagccaaacgaaaatcctgacgtaaagtcatgaatcccaagcgaacacagtcccactttccatcttcattatttacgataggcagactgacttgcatccgtagcgaagcccccttccataattgcatttccagagcgggttgcagatcaagagccgccttatatagtttataagttacattattgactaacatcacaccaggatataacaccaaatccaccttaccgaaagtactgtcttcccgttttattcctttcaaacgacgcatggcggttcctgtagaagtcgtcatctccatattacgatatacctcatccaacgtgtattcaccggactgatactgttgaaccagttttgccgggagagttatacacagctggggtaacgcattatctaatataaccaattgtagagtcggcatttctggcatagcaaccaaatgacgtatggcaataccgatcccattataagctcctctatacacagaagtctcaaaagccgctgttatcgtgtcacttttctctacaaccgagatattctccatttccagttttttcaaagtttcgatcacacgaacggactgtgcatgtaacgaaattccccaacagagaaaaacatatactataccaactattcttttcatcttcatttaatgtattaatgtacattcataccgtaaaccggcagacacacatgtaaattcgcgggtaaacacgttgacggatagatgcttccaaaagcgcatagcagcaccaatgttccaaccatgcgtatcatattccgccatgaatttcaattcccgacaaaaagagggagtataacgaactccgccgaaaggtcctttattatatacaggcttatcaccctgatgaaaataccaacccgccgtaattgccagttgatgtcccgaacggaatccgattgttttagtaagcacaccatagtaggcaccccaatatggagtttttccttcagtcagaagatcatcccccccaatcacaacagccggaaaataacggctttcttttaacggacggatacgaatcgtattggaacggtcttgattgtgataacctgttcttcccgtagccgttgtcattttgagtaatgtcattcgataagtaaattcaatgaaagaaaacagtgtcatatccacgaaataattcattgtaggaaaactgaaaacagaaggggtaacttgctcgggtaggtagtttgctcctcctataaacgtaccggtttcctgcatctcggcagtaggtatcattaattgtcctgtcgatcccaaggagtattgtgcacgaaccaaactggtcgtcaatatgaaaatcagaagtagaataatgcctttcaataaaataaatggcttattcctgaaaacagctttagtttgttccatctcaatttgtatattgttccccaatagcaattttctcaaagaattgattaatctgctatttttactattcatatttctgttacttcttaggtaacagaacacacacaatcgaaactaagcggaatgaaaatagagaaaaacatcgacaaatgtggtaccaaagggctttctggctttagtgaaagaggaaatccttttgaatataaacaaattagcaacagagcatgaagacaatattatttcatgttcggatatttttttgccctatgtttcagataaaacgaaaaaaaatggaggattatttgtttgctatttctttttttgtctatctttgcgtcaaatttaattctgttacctaagaagtaacacacatacttcactgcttattatcagcattttacctatttatcactagttacatagcaatttctaacgtaagataaattcattctatttacttctgtacgttcttgcagattgaaacctttcagatagatttgtgttgtttttatagatttgtggcctaatgattcacttatcatttcaataggaactccacgatatttagctgttgttgcccaagagtgacgaagagtgtatgaagatacaggcgaatttagatgaagcactcttgccaaatccttcaaacgattattaaactttcgaagtgcagactgatattcccgataagctccttcatctttccgttttttgtcgccagacaggatatcaaacagataatcgggacagtcagaaggagtcacttggttacttcgaagctgattaatcatttccttcgcagtatcaagtacttccacactcataggagtcttagtcttgatacgattatatcgtagcacattactgtctaaggaagacttttccaaatgagccaaatcggcaaatgacattccacaaaactgaaacatcaaagcagcaatagtttgtgtatgacgcaagcgctccgatttgggatcatcatacaaaagcctgtgaagctcggcaaccggcaaggctttcttttgccggatatccacccctgtatagacatcgtgaaataatcggtgcacataaggggcactccccgattctactcctctattataaatgcagcgaagcatacgcatatatgtagaaaccgtattaggtttcaagccacattcatataggtactgcccataacaacgcaaacgtccccgggtcacttgcctgaacgatacattgaacgtaccgcaaaacgtagtgaaagataaaagggcattcttatagacatgcgccgtagaataccgtccttctttccgtaaacgctcgatatacatctctgcacatcggctaaatccatttttattcattttttgcatcacaaataattttataaataatataatgtatgagaaagaacaaaaataagctactttatgatttcgaccactataaaaataaaaagataaaggctcgaataatgttttttcgattatttattcgcacaaatcaaagaaagtgcctatctttaccacaagtattttttattattcaccattaaatgtaaagattatggcaagtagaagagaactaaagaaaaacgtaaactatatcgcaggagagttgttcaccgagtgtttaatcaacagcatgtttatccctggaacagataaggataaagcagatgaactgatgtctgaagtattgaagatgcaggatgaatttgtgacccgtatcagccacacagaaccgggcaatgtgaaagttttttataaaaaattccgtgctgattttaatgcaaaggtaaacgagattattgaagctatcggaaaattgaactaaaaacagaatgaagaaagcaatttatagctttatctattaccgcctgttagggtggaaaacaaacgttacggtacctaattatgataaatgcgtaatatgtgccgcaccacacacaacgaactttgatttatttattggaaaactattttacggtgctttaggccgcaagacaagtttcatgatgaaaaaagaatggttcttttttccattaggattaattttcaaagctgtaggcgggattcccgtagatcgtggacggaagacttcattggtagaccaaatggttcaccactttaacgaatgcaaaaagtttcatctggccattacccccgaaggaacccggaaagccaatccaaactggaaaaaaggattttattatatctccctcaaagcgcaggtgcctatcgtattgattggcatcgactatgaaaagaagacgatttcggcaaccaaagccattatgccttcgggagatattaataaagacatgagggaaatcaagctctattacaaagatttcaaaggaaaacatcctgagaactttgctcttggagaaatatgatttaagtattagacaataagtattaaccataatggattccattcgagtttctatcatacaaaccgatatcgtttgggaaaataaacaagaaaatctccgtttgctccacgaaaagctacaaagcctccgtggaacaacggagattgttgttttaccggaaatgttctcgacagggttcagtatgcaaagccagacattagcagagcccaattccggcaaaacaatctctactttgaaacaatgggcatccttatttcaactggctatctgtggaagctatattgccactgataacggacagttttataaccgtgctttcttcctcactcccgaaggagaatactatttttacgataaacgccatttgttccgcatgggacgtgaagccgaacacttttccgcaggtaacaaacggatcatcattccctatcatgggtggaatatctgcctgcttgtatgttacgatctccgttttcctgtgtggagccggaacgtcaagaatgaatatgacttattaatatatgtagcaaactggcctatcccccgtcgcctggcttgggacgctttgctccgagcacgtgctttggaaaatcaatgttatgtatgcggtgtcaacagaacaggcatggacggatatcatcttaaatataatggaggaagcaaaatctattccgctttcggagaagaaatagcctcattgccggacgaacaggaaggaatagctacgacaagcctccaactgggtgctctcaaccggctcagggaaaagtttccggtttggaaagatgcagacgaatttcatctttagtatttgctataaaacaaatgttaaaaacggcttgatatagcaacaatacctagatgttagtagttaaacatatagacttcttttgtatctttgtcgtgaaaatacagtcgtaaggacgctaatcttacataacttaataaacaactttatgaaaacaaatcttagttctcaaatcagcctccaccgggtctcccccagatactacagaccggagaatgcatttgaaaaatcagtcttgacaagactcgaaaaaatccctacggacatctatgaatctgtagaagaaggggctaactatattgctcgagaaatagcacagaccatccgcgaaaaacaaaaagcaggacgtttctgcgtattagcacttcccggaggtaattcacccagccatgtatatcaggaactgatccgtatgcataaagaagaaggccttagcttccgtaacgtgattgtatttaatatgtacgaatactatccgttatcttctgatgcaatcaacagtaacttcaatgcattgaaagagatgttgttggatcatattgatattgacaaacagaatatatttactcctgacggaacaatcgccaaagatacaatcttcgaatattgccggttgtatgaacaacgcattgaaagtttcggaggaattgacattgctctgttaggtatcggtcgcgtaggcaatatcgcattcaacgaaccgggttcccgactgaattctaccacccgcctgattttgctggataatgcttcacgcaatgaagcatctaaaatcttcggaacgttggataatacgccgatcagttctatcacaatgggagtatcaactattctcggtgcaaagaaagtctatttacttgcgtggggtgaaaataaagcagctatgattaaagaatgtgtagaaggacctatctccgataccattcctgcatcttacctgcaaactcacaacaatgcccatgtagcccttgacctctcggctgctatgaacttaacccgtatccaacgcccttggctggttacttcttgcgaatggaatgataaattaatccgcagcgctatcgtttggctatgccagttgacaggtaagcctattttgaaattaacaaataaggattacaatgaaaacggtctgagcgaacttctggcattgtatggttcggcatacaatgtgaatattaagatattcaacgatttgcaacatactatcacaggttggccgggtggcaaaccgaatgctgacgatacttaccgtccggaacgtgccaaaccatacccgaaacgtgtgattatcttctctccgcatccagatgatgatgtaatctccatgggtggaacactccgtcgtctggtagaacagaaacatgaggtgcacgtagcttacgagacttccggcaatattgccgtaggtgatgaggaagtagttcgtttcatgcatttcatcaacggattcaaccaactcttcaacaacagcgaagaccaggttatcaatgagaagtatgcagaaatacgtaacttcctgaaagaaaagaaagacggtgatatggacagccgtgatatacttactatcaaaggcttgattcgtcgtggtgaagcacgtaccgcttgtacttataacaatataccactagaacgttgtcacttcctcgacttaccattctacgaaacaggtaagattcagaagaacccaattagtgaagcggatgtggaaatcgtacgtaacctgcttcgtgaagtgaaacctcatcagatttttgtagccggtgacctcgcagatcctcacggaacacaccgtgtatgtacggacgccgtatttgctgccgtcgacctcgaaaaagaagaaggtgcaaaatggttgaaagactgccgtatctggatgtatcgtggtgcatgggctgaatgggaaattgaaaacattgaaatggcagtgcctatcagtccggaagaacttcgtgcaaaacgtaactctatcctgaaacatcagtcacaaatggaaagtgctccgttcctgggtaatgacgaacgtttgttctggcagcgcagtgaagaccgtaatcgtggcacagctactttgtacgaccagttaggtctggcttcttacgaagctatggaagcattcgtagaatatattccgctataaatagaaaagctcttaattaagagaatataaaacaatgaaagaagagtgggaagtttcgatacttctcactcttttttgtttatttttgcggggaaaacctaaaagcattgaatgatgaaaaaaataatagtgttcttcatatatctgacaatggggattaatattctttttgcccaagacatcgaaagtaatataaaagagcggctaacggattatttcaataaatataccgcaactgccaaaatcagcaccccaaaactgaatagcttcgacattgattatgaccgcaaaacaattgctgtttatgcctctgaaagctttgcctaccaaccttttcggtcggaaaccgtagagactatttataatcaagtaaaagatttacttcccggtccggttcattactaccagctcactatttatgcagacggcaagccgattgaaaatttagtgcccaacctttatcgaaacaagaaaaaagataaggaacggatgtctttggacattgattataaaggagttccctgggtgaaaaacatctcacgccccaatgaagtatcacgcgggttacaagaccgccatatcgctgtctggcaaagccacggtaattatttcaaaaacgataaaaacgaatggggctggcaacgcccccgcttgttctgcacaacagaagatctgttcactcaatcttttgttcttccttatgtaattccgatgttggaaaatgcaggcgccgttgtctacacgcctcgcgaacgggatacgcaaaagaatgaaatcattgtggataatgatacgcctaacgcttctctctatctggaggtaggcagtaaaaaagctaaatgggacagagcctcggtaagaggattcgcccaaaagaaaacaatctaccaagatggggaaaatcctttcgcagacggtacttgccgaatgatctccacagaaagaaagaaaaagaagaacaaggaccaagcttttgccgaatgggtacctaccctgccggcaaccggaacatacgctgtttatgtttcttatcagacattacccaacagcgtaagtgacgccaaatatcttgtctttcataatggaggggttacggaatttaaagtaaaccaaaagataggcggaggaacttgggtatacctcggcacctttgaatttgacaaaggcaacaacgattatggcatggtggtattgagtaatgaaagcagcgaacatggtgtagtatgtgccgatgcggtgcgtttcggtggaggaatgggcaatatttcccgcggaggaaagataagcggattgccgcgctatctggaaggggcacgctactctgcccagtgggcgggaatgccttacgatgtatatgccgggcgtaaaggcgagaatgattatgcggacgatatcaacacacgctccaatacaatcaattatctatcgggaggttctgtttataatcctacgcaaccagggctaggagtaccattggaaatgacaatggcacttcacagtgatgccggatgcagcaaaacggacgaaatcatcggttcgctcggcatttacactactgatttcaataacggcaaactgaatatgggaacggaccggtatgcttcacgtgatttggcggatattctgctcacacaaattcaaaaagatattcgttcaagctataatctcccttggacacggcgcagtatgtggaaccggaattatagcgagacacggcttccggctacgccttccaccattatcgagctgctttcacatcagaactttgccgatatgcagctcggccatgaccccaacttcaaattcacggtaggacgcgccatttacaaaggaattttgcagtttattaccagccaacatgataaagattatgtggtacaaccgcttcctgttagcaactttgctattcgtttcggcaaaaaaaagaatacgctggaactttcgtggaaaggagaagatgacccgcaggagccttcagcacgtccacgggaatacattgtatatacacgcattggttacggaggttttgacaacggaactttagtcagcaagtcttcatacactgttaagatagagccgggactggtttattcattcaaagtaacggccgcaaacagaggtggagagagtttcccttctgaaatactctcagcctacaaagcaaaacatgaacgtgaaaaagttttaatcatcaatggatttgataggatcagcggtccggccgtcatcaatactccggataaagcaggattcgacttagagcaggatccgggagttccgtatctgtcgaatttctcattctgcggagtacaaagcggattcgaccgcacacaagcggggaaagaagggaaaggaagtttggggcacagcagtagtgaattggaaggaatgaaaatagcaggaaatacatttgattatccattcattcatgggaaagcgattcaggcaaccggaaaatacagtttcgtatcatgcagtgacgaagcggtagaaaacggaatcgtcacgttggaagattatccgattgtagattatatcttaggacttgagaaagaggatgcgtcagctaaggcttattacaaaacattttcttcggcaatgcaacgcattatctccagttattgccaatccggcggaaatatacttgtgagtggtgcatacgtaggcagtgacatgaatggcacgcaaggaaacagggaatttacacaaagagttctgaaatatgggtatcaaggtagtctgacggacaaaaattctaatcggatcaacggactcggacacacaatcagtattccccgattgcccaatgagaacaactatgcgatccccgctccggattgcattgtcccggtagattccgcatttccggtatttacttatgcgcctggcaatcaaagtgcaggtattgcctataaaggaaactatcgtaccttcgtactgggtttcccttttgaaagtatcctgtcggaagcagaccgtgcaatcgttatggcaggcatattgggattctttactcaaaaataagagttcattgcagggaaacaaaaaatatccctttttatagcctgtttttcattttaaattctatctttgcaagaaacaataactcttaaaactaaagaacaatgtatactatacaagcaaatcccagcggtacacgcagcatagaggtatctactgaaaatctaagaacaattgaaaaatattctctgttccgtcacctgattgacagtacaggtattgtagacgaaccggtgctggacaaactgaaattgaatgtccgctctcttatcgccagtcaggaagaagacagtaaagatttgctggatctttgtattgatgtgatttatcacaataatatgaaagcgttcggcctgcaacagcttatcaagctctatctgacctggctctccagtccggaagcagaagaagaggaggaagaatgattacggtggatacccggggaacaacggcatacagtccgttaattcccgcaatcaaagccatgtgtaacgctgttcccggcgaaacgctagaaatcatcatgaaccatgccgacgcatttcaggatttaaaagaatatctgtcagagcaaagcatcggctttcgtgagatctatgacggcgaacagttgactgtgcaatttacaatcgcaaagaaataactacaaagcgataaagcataaagttataaggtgataagaggcgtggctgaactttatagccctatcatcttataactttataagtttatccgtatctttgcggcatgaaagattttcgactgactgactggttacctacaacaaaaaaagaagtagaacttcgcggctggaatgaattggacgtcattcttttcagcggtgatgcatacgtagaccacccttccttcggagcggctgttatcggacgtatcctcgaagcagaaggattaaaaattgctatcgttccccaaccaaactggcgcgatgacctgcgtgacttcaagaaattgggacgcccccgtttatttttcggcatttccgccggaagcatggattcaatggtcaataaatatactgccaacaaacgcttgcgcagcgaagacgcttatacaccggacggacgcccggatatgcgcccggaatatccttctatcgtttatagccaaattctgaaaaagctatatcccgatgcccccgtaatattaggaggtatcgaagcaagtatgagacgcttgagccattacgattattggcaggacaaagtacaaaaaagcattttatgtgacagtggcgcagacttgctgatctatggtatgggcgaaaaacctattgtagaattaatccgcaaaatgaaaaacttgctccccacagaacaagccacgttgacaaccaacgaatttaaaacgatcgtcggaacaattcctcaaacagcctatctttgccgtgcagcagaatggacggcagccgaagaagacattcaactttattctcacgaagaatgcctggcagacaagaagaagcaggcaagcaacttccggcatattgaagaagaatccaacaaatatgcagcttcacgcatcacacaggcggtaggaaacaaagtggtagtagtcaatcctccataccctccgatgagtcaggaagaactcgaccattcgttcgatttgccttatacccggctgcctcatcccaaatacaaagggaagagaattcctgcgtatgatatgattaaattctccgtcaatattcaccggggctgtttcggtggctgcgcattctgcaccatctcggcacaccaagggaaattcattgtcagccgtagtaaggcatctatcttgaaagaagtaaaagaggtgatgcaactacctgatttcaaaggatatttaagcgatctcggcggtccttctgccaatatgtatcagatgaaaggaaaagacgaggcgatttgcaagaagtgcaaacgcccctcatgcatacatcctaaagtttgtccgaacttaaattcagaccaccgtcccctattggatatttatcatgcggtagacgctctgcccggtattaagaaatcctttatcggcagtggagtacgctatgacctgttactacatcaaagcaaagatacggcaaccaatcgcagtacggccgaatatacccgtgaattgatagccagtcacgtcagtgggcggttaaaggtagctccggaacatacaagcgaccgtgtattgtccatcatgcgcaagccttcttttgaacagtttgaaacattcaagaagatattcgaccgcatcaaccgggaagaaaacctgcgtcagcagctcattccttattttatatcttcacatcccggatgcaaagaagaagatatggcggagcttgccgttatcaccaaacgcctggacttccacttggaacaggtacaggacttcacccctactcctatgacagtagcgactgagacttggtataccggatttcacccgtacacactggaacctatcttcagtgctaaaacacagcgggaaaaacttgcccaacgacaattcttcttctggtataagcccgaagaacggaaaaacattatcaatgagttgagacgtatcggacgtcaggacctgatagataaattatatggaaagaagaaataattcttctttccatataaacaaaaacgattaaaagagttcctcattaacaatatatcattctttcaccggcaacgccacaacttcttgcaacacactcaccgcagtttccacattagtcacatcttttatcagcatacttcgcttgccgttctgttcacgcaggtcacaacggcgggtatatttcatcatataatctatcactttaccgaaagcctgactttgatagaacggactatccgggttggagacaaagaacaacgtcatccgaccacctttcaggaagatcttctccgctcccaagcgtgctgccagacggcggagaggaacaatacgaagcaattcttccgtttccggcggaacaggtccgaaacggtcctccagacgggaacggaatgcctctacgtctttatccagcatcaaaccgtccaattcacgataaagcaacatacgttcgctactgcccgtcacgtaattagcaggcaataacagttcaaggtcactttccacctgacattcatccacaaaaccttcaccgctaatctgcccttcacctttgatttcatccgcatacaaatctgcaaattcatcattcttcaattcgtgaacagcttcggaaagaatcttttgatacgtttcatatcccaggtcggcgataaatccgctttgctcggctccaagcaagttaccggcaccgcgaatatccaaatcctgcatggcgatatggataccactgcccaaatcactaaaattctcaattgcttgtaaccgacggcgtccctctgctgtcaggctactcaacggaggagccaacaaataacagaacgctttcttattgctgcgccctacacggccacgcatctgatgaaggtcactcaaaccaaaattctgcgcctgattgatgatgatcgtattggcattcggaatatcaatgccactttcaataatagtagttgcaaggagtacgtcatagtcatagttgacaaaatcaaaaatgattttctccagttcggcaggttccatctgcccgtgtccaattgccacacgacagtcagggatatgacgttcaatcatcgcttttaattcgggcaggtttgctatccggttgttgacaaaaaacacctgtccgttacgactcatttcaaagttgatagcgtccgttatcacttcttcattaaaggtatgcacttcggtctgaatcggataacggttaggcggcggtgtagagatcacactcaggtctcgcgcacccattaatgagaattgcagcgtccggggaatgggcgtggcagtcatagtcaatgtatcgacattcaccttcaactgacgtaacttctccttgacggaaacaccgaatttctgttcctcatcaacaatcagtaatcctaaatccttgaaccggacatcttttcccaaaatacgatgagtaccgataagtataccgacatcaccttccttcaattctttcagcaccgcttttgcctgtgcggccgtacgtgcacggctcagatattccacccggcaaggcaatcccttcaaacgttcgcggaaggtctggaaatgctgataagcaagcaccgtggtcggcaccagaactgcaacctgcttattgtccgccaccgccttaaaagctgcccggatagccacttccgtttttccaaagcctacatccccacagacgagacggtccattgggcggtcactctccatatcggtcttcacatcgacagtagctttgctctgatcgggtgtatcttcataaataaaagacgcttccaactcacgctgcaagaaactgtcgggactataagaaaagcctttctcctgacgacgttgcgaatacaacttaatcaaatcgcgggcaatatccttgattttggtttttgtacgctctttcagtttctcccatgcccccgttcccaacttattaaggcggggagcttcgccatccttacctttatatttagagaccttatgcaaagaatgaatcgagacaaacaccacatcctcattctgaaaaaccagtttcagaacttcttgcgtagtatctccattcggaatacgcaccaatccggaaaaacgtccgataccgtggtccgtatgcaccacataatcacccggagtaaactgattcagttctttcaaggacagggccactttacctgaacgagccttatcgcttttcagattatatttatggaaacggtcgaacaactggtgatctgtaaagatacagagacgcaatgtgttatcaacaaaaccttcatgcacagtacgttctacaggagtaaatttgatcttatccccccggtcttcgaagattgcccggatacgatccgtctgcttcatgctgtcactacaaatataaagggtatatcctttttccaaatactccttgaaagagccggctaccaagtcgaagtttttatgaaagataggctgtgcggaagtatcaaaagtgacgctggcattcggagtaccggtcggcttgttaccaaactccagccggcggaaatcaagtgcacgcacggtaaattcactgccgtctatcagtttgccttccaacgtaataccgccattttcttcgacttcctgtacggctatcgcctgcggcgtcaacgcctcatcgtgcacgacctgaatccgttcacgcaaccaaaggaagtcacgcattgccaaggtagtctctttcggtatgaaatccaaaaacgaggtagtaacatctcccgtcacagccaaatcgggcacgatagacactccttctttcttctcccgagatagctgggattcaacctcaaaggtacggatactctctacttcgtctccaaaaaagtcaatgcggtaaggatattccgaagcaaaagaaaagacgtcgatgatgctaccacgaacggcatactgccccggctcatatacataatccacatattcgaaaccataactatgcaacacatccgtgataaaggtcgtgtctaccttctcgccgacattcagtttcagagtcttatcgctcaattctttacgggatacgactttctccgccaatgcatccggataggtgacgatgcacaagcccttctcccctttctgcaaacggctcaatacttccgtgcggagaatctcatttgccgcatctttttgcccgtacttaatggaacggcggaacgaagaaggaaagaaaagtacagtttctgtccccaacacttgcgtcaagtcgtgataaaaataccccgcttcctccagatcgcccagaataaagacaaaaggacaacctccctcctgcaccaatatagaagaaaaaagcgaagcagcagacgcatataatcctccacaaaaaatagtttgaacagaagtatccttcaacaaacgcttcatcactgccatgttaggatgggcagcatatagttgttgcaactcagttatcgtcatacctataaaaatttccccgcaaaagtacaaaaataacgcgagcaccttgtacattaccgttagaaattaaaggcagtaccgcttgaatttaattctatttccccattcgtttacttctcaatatactatcctttattcgtttgacagctgttgaacacaaactcaactattgtcagacaaatagaatcttgcataaaagaacttagtccttaagggcaaaaacatctaaatactagtactaaaaagctaaacttaccatatacttccacgttaaattatccttagtccgttcgtaactaaaggaaaagaactacttttgtttctaaaatttatagtatttatatgcaaatatcggatagcattgtaattatccctacctataatgaacgggagaacatagaaaatatcatccgtgccgttttcggacttcctaagatattccatattctggtaatagaggacggttcgccggacggaacggcaaacatcgtcaagactttgcaacaagaatttcccgaacgtctttttatgattgaacgcaaaggaaagttagggctgggcactgcctatatcgccggattcaagtgggcactggaacattcgtacgaatatatttttgaaatggatgctgatttcagtcataatccgaatgacttgccccgtctgtatcaggcgtgtgcggaagcaggaggagatgtagctgtcggctcccgctacgtcagcggagtgaatgtagtcaattggcctatgggcagagtactgatgtcttatttcgcatccaaatacgtgcagttcattacaggtattcctatccacgataccactgccggatttgtttgttaccgccgacaggtactcgaaacgattgatctagaacacattcgttttaagggatatgccttccagatcgaaatgaaattcaccgcttataaatgtggtttcaagattatcgaagttcccgttatcttcatcaatcgcgagttgggtacttcgaaaatgaacagcagtatcttcggagaggccgtattcggagtgattaaattaaaagtaaatagttggttccacaaattcccccaaaagaaatgaaacgtacactgattcaaaaggccgttatagtcaacgaaggaagaaaagttctgggttcggttgttatcgaaggcgagaagattgccgaaatactgaccggagaagaaaaaacaactacaccttgtgatgaaatcatagacgcaaccggatgttatcttttgccgggcgcaattgacgaacacgtgcattttcgtgacccgggactgactcataaagcggatataactaccgaaagccgtgctgcggccgccggaggcgttacctctatcatggatatgccgaatacgaatccgcagacgacaacgttagaggctctggatgagaaacttgctttattggccgggaagtcggccgtcaactattcctgttacttcggggcaaccaacaataactacccgcagtttgcccaactggacaaacaccgtgtttgtggcgtaaaactatttatgggatcaagcacaggcaatatgctggtagaccgcatggcgagcctgcgcaatatattcggcggaaccgatttacttatcgccgcccattgtgaggaccagggaattatcaaagaaaatacagacaaatataaaaaagcatacggggacgatgtgcctttgacccttcatccggttatccgttcggaagaagcttgttaccgttcctccgaactggcagtacaactggcacgtgaggcaaatgcccgcttgcacatcatgcatatttccacagccagagaactggatttattttccgacgctcctttgataacgaagcgaattacggcggaagcttgtgtttctcacttacttttcacggaagatgattatcaaactttaggcgcacgcatcaaatgtaaccctgccattaaaacagccgaagaccggaaggctttgcaggaagctgtcaacagcggtctgatcgacgccattgcgaccgatcatgctccgcatctgctaagcgaaaaagagggaggcgctttgaaagcgatgtccggaatgccaatgatccaattctctctggccagtatgctggaacttgtagataaaggtatcttctctatcgagaaaatagtagaaaagatgtctcatgcgcctgctcaaatgtatgaaataaataatcgcggatttatccataaaggttatcaggcagaccttgtattagtacgtcccaactccaaatggacagtaacaacggattgcattgtaagcaaatgccaatggagtccgctggaaggtcataccttcaactggaaagtggagaaaacatttgtgaacggtcacctgttatacgataacggaaaaatagacgaaacttatcgtggacaagaattaagattcagataaatataattcgtcatcggcaaacttatgagcactgttctatcttataaaatacataccgttaccccctacatcaattggatttactttttccatgcctggggattccaacctcgctatgcagctatcaccaatattcatggttgcgatgcctgccgtgccatgtggctggcctcctttccggtagaggaacgtaacaaggcttcggaagccatgcaactgttcaaggaggcaaaccgtatgctggatgtactcgaccgggactatgaggtcagaacaatcttcaagttgtgtaaggcaaactccgacggggataatctggtaattgaaaaagcagagaatcagttcatggtctttcccttactccgtcagcaaacacctaagaaggacggaagtcctttcctttgcctgagtgacttcatccgtccgctttcttccggcattccggatacgttgggagctttcgcttcttccattgacgcagacatggaaggactatacgaacaggatccttacaaacatttgctcgtacaaaccctttctgaccgacttgcggaagcagccacagaaaaaatgcacgagtatgtgagaaaagaagcgtggggatacgcgaaagacgaaaatttaggcatggcggacttattagtcgagaaatatcaaggcatccgtcctgccgtcggttatccttctttgccggatcagtccgtcaacttcctgctggacgaactgctggacatgaaacagatcggcatttcactgactgaaaacggggcaatgtatcctcatgcatcggtgtgcggcctgatgtttgcacatcctgtatccgaatatttttctgtcggaaagatcggagaagaccaactcgaagactatgcccgccgccggagaagaagtattgaagaaatgcgcaaattcctggcagccaatctgcaatagcttgcatcttcgtgtgatttttctccttttctcacgactaactaaccagaaaagcaatcctaaaatccatgagagaaccaacaacagaggcaaacaaccctattgagcaagagttcttgtcggttatacgcgaatatgagcgggtaatctacaaagtatgctatctgtatactcatcccaacgctccgctcaacgacctctatcaggatgtagtactgaacctctggaaagcttatcctaaattcaggaaagaatgtaaaatatcgacatggatttaccgtatcgccctgaacacttgtatcagtttttatcgtaaagagaagaatgtaccggaaattatcagcctcaccaaagacattgaccggacaatagaagcacatgaccctatcaatgaaatgctgaagcaactataccagatgattaaccaactgggacaactcgacaagtcaatcatcctgctataccttgaagataaaagctacgaggaaatagcggaaattaccggcttgacggtgactaacatagctaccaaactaagccgtatcaaagacaaacttaaaagaatgaaaaaggaggaataagatatatggaactggaagaactgaaaaaatcatggaacgccctcgatgagcacttaaaggacaaagaactcatcaaagaagacgaacttgaaaggctgataggacacgccgacaaaggtatccatgccattgcccgcctgaacatcaggctaatcctgatttccctgccgatattaatcttatttttgacggaagtgatactgcacaacagattaaacccgatctacatcattatccttctggcatggattcccgctctttgctgggatatcgccaccacgcgatttcttcaacggactcaaatagacgaaatgcctcttgtggaagtgattgcccgtgtcaaccgcattcatcactggacaatcagagaacggctgattgccaccgctttcctcctgatacttgccattctttctttcgtctactggcagatatggcaatacggaataggtatgattctgttcttcatcctgttgtggggaggaggtcttatactcattctatggatttatcgcaagaaattcctgaaccgtatccacgaaatcaaaaagaatttaagtgaattaaacgaattaatgtaaatatccattataactaaagacacatatgttgcaacgcttatttatattcctcctactttttctggtacttccggacctctatctttacttgagattcattgttcgtctcaccgcaaaatggtggttacgcgttctttactgggtacccagtttcttgctaaccgcagggcttctttacttggtttactttgccaacaatgcttttgcggaacgccatacacaggacatcgggtggttctctatcatctttttcctgtttacagctcccaaactattgctggtcttatttaccgtactcggaatcccttttcataaatggcttcgctggccgcgcacaccgtttatatgcaccggactgacactggccgtacttagtattgttatgattctctacggctcttttgtcggacgaacccggtttgaagtaaaagaagtcacttacacctctccccgactcccgcaggctttcgacggttatcgtattgtacagttatccgaccttcatatcggcagttggcaaggaaacactcctgctattcggaagttagtggatttagtgaatgcccagcaacccgacctgattgttttcaccggagatctggtaaatcaccgggctgtcgagctgaatgatttccaggaaatactagccggcctgaaagccggagatggagtttattccatacttggaaaccatgattacggaccttattttcattggaaaagcaaacaagatcaggacaataatctgatcgaacttaaacaaaggcaggcagctatgggctggaagttattaaacaacgaacatacatttctgattcaaggcaatgacagcatcgcccttatcggagtagaaaaccaaggagaacctcccttttcgcaacatggcgaccttccaaaagcgaaagcaggaatcgaaggaatgttcaagctacttttaagccataacccgacacattggagacgggaagtacttccggaatcggatatagatttaatgttggcaggacatacccacgccatgcagttgcaactgggcaattattccccttccgtttatatttatccggaatggggagggatgtatttggaaggtactcgcgggctttacgtcaatgtaggaatcggctacgtgggattacctttccgtttcggcgcctggccggaaatcactgtgcttaccctacgacggtaagcacgctctttccattgactttcttatgcacctgcacctggacggagatccgttcactcatttcctgtacatgagaaattactcctattttccttccttgcatctgtaattgttccaacgcttccatagctgtccgcaagctatcggcatccaaagagccgaatccctcgtcaataaaaagagattctactttcaggttgttgctcgacagcgaggacagtcccagtgccaatgccaaagatatcagaaacgactctcctccggaaagagaatatacagtccgtatttcatcacacatatcacaatcaatcacctgaagcgccaaagtgccgggtacttgctgcaatttatagcgtttggatagataagacaaatgcttgttggcatgaagtaacaataaattcaatgtatagctttgtgctataactttgaactttgctccgtcggcactaccgatcaacttgttcagtttagcccaacgttcggcaatcaattgcttttcggccagctctttagctatcagttcggctgttactttattttttgcctgttgcaacaggcggacttcgatagcagaaaggctacgttccgtatttagattgtctttctgctgttgctttattatttcgggaagttgttcgggagattcaatctttttctgttgctcctgcaattccccgacagttgcggcaatctgtttcatttccccttgtaagcctaaaagacggttgtgcaaagtttctactcccaaccgagccccgtctaaagcatgagtcagttctttttcccttttggctacaacggcttccgcttcatccgcactctttccttttaataattgcgaccgttcctgacgaagtgcatccaacgctttctctattacttcaaagcgtttctgttcggcagaagcagcgttttgtaatagtgccaactgttctttagcagacgaaacttgctgcatagtcaaacgacattgggaaacattttcacgcaaagcctcacaatggacacgtatcttctttatcgcctcatcatttcgttgccactccgtatagagactactatactcctgaatacgttttgccaattcctgcaaacggttctgtatctgttcttcgtttcctgcatgaatttcttctttctgccatatggataactgttctttgatctgtccggcaacagttttttgatgcgccagatcacgttgcagggctatatgctgattatttgtttgctgacaggcaatcaccaccgcattatactcctgctctatatttcggaaaagaatatccactacttcctgttcccggtgataaggatgtgacgtactgccgcaaaccggacaagcttctccttcctgtaactgttgacgcaatgctttcacgtcttttcccactgccatacgggcattttcataaagacgctgaatcgtttttcgtgtcgcttcctgttctgttaactgcatcgaacaatcaaccgtttctttctccagtcttactatttctgttttcactttctcctgcgactcagtcaactgccggacattctgttgacgaaccagttctttttgtagtttcttctgttcttcgtctaatgatacataatcaaaagcatttagccggaccagtcgttcctcattggcttttatggcggctttcagtttatcttcttcctgctgtagaatatcctctacttgttcaagcggcaacgactccgtttccgtattcgtcaacaaacggtttaatgaacgataagccccctgcaactgtttcgttgccatccgcatcttcttttcctgctccgccacctgcccgcaagctgtttccaatatctgccgcaactgattatagccttcctgttgagactgtatctgcacatccaactgacgggctttcttcaaatccggttgtatagcttcccattgtgctttgaaacgtaccaacccttcttcctgtgaagccagtgtttcctgcaggagtctcaactttgcctcttcgccttgttcttcctgttgcttctttttccaaagttcctcctgcatctttaacgaacggacaatgttcaaccgggcattctgttccgccagtaattgaatccccactgcacgtttcgcaatcagcaattctttttctttctgtaaagcaagaagttcttcctccggcaagaggtcgattacactcattctatttcgaatcgtagtcacttcttcctgtaccaacttgtttcgtaaaaaaacttcctgagaaatacgggaataaacaccggttcccgtcaatttttcaagcagttcggcttttgcggctcccttcgatttcaagaatgtagaaaaatcattttgagccaataagacagtccgggtaaactgctcatacgtcaaacccaccaattctgtcagttgagccagcagttcctttttggttccttgaaactctttccctgtatccagctctttcacttccatcgtttgtggttgcaaggaaccgctcaccttatttcttgtccgtctcaccgaccagcgagaacggtatctatgaccatcgactcctaagaaatcaacctctgcatatccgtcggtcgtaccacgacgaagcagattccttacatccgactgattaatctgattatctcctacatccgccaaatttatactttctaccgaatttgcaaaacgaggtgctttatcatacaatgccagacacaatgcatctaataaagtagatttgccagctcccgtagcacctgaaatcgcaaatattcctgccgagttcaacggctccattgcaaaatcaacttctaccgctccttctatcgaagtaagatttttcaatcgtatcgctaatatcttcattcttcttcctcctctttacgtgtagcagccaggtaggcttcctgaaacaagtctgtcaactcctcaggcatttccacctgataaatcttttcaaatgcagattgagcgatctgcaacggagacatttcttgtaatcctcttttccaattctcattttccttctctgcatttcccgtttcattacgataagtagagacaatacgcgccaaccgataatttttatcagccaatgcttcctcaacttcctgccggagcattggctccggttcgtccaacaacacttttacctccagataaggtgctgctccttccgttaccggcaactctttcaagatttccaacacaatttccggagacgcaggttctccattcggcacgctcatcaaaggtattaacctcgggcattccacccgcattatatctaccgcacaccctccgtcgaaagtcacttccacgaccccgtgatgataatgcttctctgcaaaagacatcggaatgggacttccggcatatctcacattctccctgccggatacgcgttgcgccttatgaatatgaccaagagccgtataagcaatttgttcggaaaatgcatcaggtgacacacattccaaaccaccaatcactgtacgttcgctataatctttctccgcaatctccgaaccgatagcctgtaaatggccgatagcaagtatagattgattctctttccgtcgcttccatagcctttgcaaaagctgcgtataaagctcccggactccctccgcatacggattaccttctgtcgggactgtcggataatctccctgccgcaaaaaaggaactgccatacaaagcaattccacctccccgtcacggttctttaactcaaccgtcaaatgatcgtaatcaatttccccatcgtccgacttgcgtactaccccccgaacctccgtccgcatcgcttgcagcaagggtaaaggagcttccaaccgcgccgcagagtcatgattgccggcaacaatcacaatctgaagagtgggattctccgccgtcactcgataaataaaatgataatacaggctttgagacgcagcagaaggattggaaacatcaaaaacgtctccggctataatcaatgcatcaatctccctttcacgaatttctccggccagccagttcaaaaagacttcatgttcaccggcacggtcatacccgaagaaagtttgccccaaatgccagtcggcagtatgtaatatacgtatcatatttttgtaactatctcatataataagatacaaaaatagtacaatcaaaaagattatatcgtatccacctctcttttttaccaaataatcatgtatatttgcaggataaaaatccaaccctatgaagatactgtattatatttatcaaatttgtattgctttgcctattttattggtattgactatcctcacggcaatcgtcactatcgtaggttctctcgtgggaggagctcacttttggggatattatccaggaaaaatatggtcacaattaatttgtctttttctattaattcctgtaaagattcgtggacgtgaaaagttacacgacaagacatcctatattttcgtacctaatcatcagggttcattcgatatattccttatttacggtttcatcggaagaaacttcaagtggatgatgaaaaaaagtctgcgtaaactaccgtttgtaggaaaagcctgtgaaagcgcgggacatatcttcgtagaccgttcgggaccgaaaaaagtgttggagaccattcaacaggctaaagcctcgttgaaagacggtgtttctctggttgttttccccgaaggagcacgtactttcacaggacacatgggatatttcaagaagggagcttttcagttagcggatgatttacaactagctgttgtacctgtcaccatcgacggttcgtttgaaatcctgccacgtaccggaaaatggatacaccgccatcgcatgatcctgacaattcacgatcctattcctcccaaaggaaaaggaatggagaatatcaaagctactatggccgaagcctatactgccgtagagagtgcacttccggagaaatataaaggaatggtgaaaaacgaagaccaagaccgataatatatgtattatatgtgggcagactctagcattactctaccatgatacaaggctatatcgcgggctacgtattcatccacttttctatttcagaaaaagtcgtattaaaatcacccggatctccctgacaagaaaccgataacacagaaataaaaaagaaagcggcgaatacactaacagtcgttttcattttatctggagcttttgcacaaatatacaaaaaaatctcctgacttatttattcgttgatgtattttgctccaaccgttgatgttcttctatcaacttcatattttcttttgctttagacaaaaactctctcacaagtttattactcttaaaagaataaggagcatctttgatgatatcatcaatctgaggtgtcataataggatatggcaaagaactacaaagcatcataaatacgctaggtcccaacacattctcataattatctgaaatgaacgtcttcacatactggttcattgccgtcatcagcgaatcaccttccaccatcagctgtgcatgaatttcttccaaatcattcccttccattaccatacgagtttccttttgttccagctccccaatactttcttccaatgcatttcttttgtcaatgaagtcatacagtgctgcattcaaggaagttcctgctgcttttaaatccgtattgctaatggtaactttaatcttaccgctttccaatacaatcggcatgatactctcatcatccatataaagcgtcaccatttgtacggagtctacttttccttccatagagaacagtccatgcactacctcagcagagtccagcttcacccattccccgtcacgcatggtctttagatacagcatttttccatccagactgtttactgaagatgttccttctatcctatacttactagtacacgaagccagaaacggaagcagaagtaaaaaaggcaaaattttattcacgttcgtccattcattaaattccgggtacaaaggtacaactgattcggacttcaaagaaacattttatcaatatttaaaacttgtaagagtcttttctttaataatccttataaacataggtgtaaggcgctttttttcatttagtttatctaattttgcagctatgaaaacatcaacttatgctccttttgccaaaccgctttacgttatggtaaagccagtaggtgccgtatgtaaccttgcatgcgattattgctactatctggaaaaagcgaatctatacaaagacaacccgaaacacgtaatgagcgatgaacttttggaaaaattcatcgacgagtacatcaactctcagaccatgccacaggtacttttcacctggcacggaggagaaacacttatgcgcccgctctccttctacaaaaaggctatggaactgcaaaagaaatacgcccgcggacgaacgatcgataactgcatccaaaccaacggaaccatgctgaccgatgaatggtgcgagttcttccgagaaaataactggctggtaggcgtttcgattgatggacctcaagaatttcacgatgaatatcgtaaaaataaaatggggaagccctccttcgtcaaagtgatgcaagggattaatcttctgaaaaaacatggtgtagaatggaatgcaatggcggttattaatgacttcaatgctgactatccactggatttttatcatttcttcaaggagatagactgcaaatatatccaatttgcacctatcgttgaacgtatccttgaacatcaggacggccgccacctcgcttctcttgcagaaaaccaaaaaggtgaactggcagatttctctatcacccccgaacaatggggtaaatttctctgtacccttttcgacgaatgggtgaaagaagatgtaggcaaatactacatacagatattcgactccaccttagcaaactgggtaggtgaacaacctggcatttgtacaatggcgaagacctgcggacacgctggtgttatggaattcaacggggatgtttattcttgcgaccactttgtattccctgaatataaactgggaaacatatacagccagacacttgtagaaatgatgcatagcgaacgtcaacacaagttcggaaacatgaaatatcaatctctacccacccaatgtaaagaatgtgatttcctttttgcctgcaacggagaatgtcccaagaaccgtttcagccagacagccgacggcgaacccgggttgaattacttatgtaaaggatactatcagttcttccaacatgtagctccctacatggactacatgaaaaacgaattgatgaaccaacgtccgcccgccaatattatggaagcattgagaaacggagaattggaaattgaagactaacaatcatatattcaaattttatcattaaaaaatgaacagactaagactttatttattagcgctgacagcgctcatcgtgtgctccgctagagcggatgaaggtatgtggttattgcaattaatgcaacagcaacattccatagatatgatgaaaaaacaaggattgaaactggaagcccaggacttatataacccgaacggcgtctctttgaaagatgcagtcggtatcttcggaggaggatgtacgggggaaattatctcacctgaaggtttaattctgacaaatcatcactgtggttatgcttccatccagcagcacagtagcgtagaacatgactacctgacagacggtttctgggctacatccagagacaaggagcttccgactccgggattgaagttcacatttatcgaacgtatcgaagatatcacggatattgtcaatgcaaagattgccgctaaagaaattaccgaatctgaatctttcagtagtgcttttcttcagaaactggccaacgagctttacaataaaagcgatctgaaagataaaaaaggaatcgttccacaagcacttccattttatgccggaaacaaattctatctattttataagaaaatatatccggatgtacgtatggttgccgctcccccctcctctatcggtaagtttggtggcgaaacggataactggatgtggccccgtcacaccggtgatttctccatgttccgtatttatgcggatgctaacggagaaccggcagaatacagcgcaaacaatactcctttgaaaacaaaaaaacatttgtctatctcgctcaaaggtttgaaagaaggagattatgcaatgattatgggattccccggaagtacaagccgttatctgaccgtatcggaagtaaaagaacgcatggaatcggaaaacgacccgcgtatccgtatccgcggtgcccgtctggctgtattgaaggaagtgatgaatgcaagtgataaaatccgcatccagtatgcaaacaaatatgccggttccagtaactactggaaaaattctatcggaatgaacaaggcaatcatcgacaacgatgtattgggtacgaaagctgcgcaagaagctaaatttgcagaatttgcaaaggaaaagaataatgctgattatgcaacggtagtgaaaaaaatagatgatctggtagctaagacagcacctctcaactatcagttcacctgcctgagagaaacgttcttcggagcaatcgaatttggaagtgtcatgctggctaagacacgtgaagcattgatagagaagaatgattctctgataaaagtacgtatcgaagcgctgaaagatacgtatgaaagtattcacaataaggactatgaccatgaggtagaccgtaaagtagctaaagttttatttcccctttatgcagaaatgattccggcagaccagcgtctgtctatctacaaagtcattgagcagaaatataaaggtaactatgacaagtttgtcgatgatatgtatgacaactctattttctctaaccgtgagaactttgagaagtttgtcaagaaaccgtctgtaaaggctatcgataatgatttggctttgcaatactgtcagtctaaatatgaccaatttgagaaaattgtttctcaattagaagatatggataaagagttgactttacttcacaagacctatatccgtggtcttggcgaaatgaaacagccagttccttcttatccggatgccaactttaccattcgtctgacatacggtaacgtgaaaccttacgatccgaaagacggagtacactacaactactatacgacaactaaaggtattcttgaaaaagaaaatccggaagaccgcgaatttgtagtacccgccaaactgaaagagttgatcgagaagaaagattatggtcgctatgcattacccaacggtgatatgcctgtctgcttcctatctacaaacgatattaccggaggtaactccggaagcccagtattgaatgagaatggggaactgatcggttgtgcctttgacggcaactgggaatcattgagtggcgatatcaactttgacaataacctgcaacgttgtatcaacctggatatccgttatgtattgttcatccttgaaaaactaggaaattgcggacacctgattaatgaaatgacaatcgtagaataaatgagaaaacaaatcctatttgctattttttctctggcaactcttatcatccacgccgacgaaggtatgtggatgctacctgatctgaaaactcagaatgagattgccatgcgagaactaggtcttgagattcccattgaagaagtatacaatgcgaacgggctttctctgaaagacgctgtcgtacacttcggaggaggatgtacgggagaagtaatctcttccgaagggctggtgctgactaatcatcattgcggttatggagctatccagcaacacagtaatgtagaacatgactatctgacagaaggtttttgggcaatgaaccgcgacgcagaacttcctacaccaggactcaaggttacttttatcgaccgtattcttgatgtaaccgactacgtcaacgaacaactaaagaaagacaaagacccggaaggaactaattatctgtctccgacttacctcaacaaagtagcagaacgttttgcaaaagcagaaaacattgaaataactcctgctaccaagttggaactcaaagccttttatggaggaaataaatattatctgtttgtaaaaaccgtgtatagcgacattcgtatggtaggtgcccctccttcttctattggaaaatttggagcggatactgacaactggatgtggccgcgtcacaccggcgacttttcccttttccgtatctatgcggataagaacggaaaaccggcagagtattccaaagacaatgttcctttgcacgtaaagaaacacttgaccattagccttgccggagtacaggaaggtgatttcacttttgtcatgggatttcccggacgtaactggcggtacatgatttccgacgaagtagaagaacggatgcagacaactaactttatgcgtcagcacgtacgtggtgcccgtcagaaagttcttatggaacaaatgcttaaagatcctgctgtgcgtattcattacgccagcaaatatgcatcatcagccaactattggaagaatgctattggcatgaacgaagggctggtgcgtcttaaagtattggataccaaacgtgcgcagcaagaagaactattggcccgcggccgtgaaaaaggagataactcttatcagaaagcttttgacgagattcgctctattgtagctcaccgacgtgacgcattatatcaccaacaggctatcaacgaagcacttgtcacagcgctcgactttatgcgcatcccctctacaacagcactggccaccgcactaaaatcaaaagataaagagaaaataaaagaagctgcccaaaacttgaaacaggaaggtgaaaaatattttgcttctgttcctttcccggaagtagaacgaatggtagctaaagaaatgctcaaaacttatgctaactatattccagcagaacaaagaatcaatatattcgaaatcattgactcccgcttcaaaggcaacatagatgcatttgtagatgcgtgctttgataactcaattttcggtaatcaaaagaattttgagaagttcatcaaaaagcctagtttatataaaatcggatatgactggatgatcctattcaaatattcaattaccgacggcattctgaaaactgccattgccatgaaagaagccaatgagaattatgatgccgctcataaagtatgggtaaaaggcatgatgaatatgagacaagaaaagggaatacctatttatccggacgcgaactcaaccttacgactgacttacggacaagtgcttccttatgaacctgcagacggtgtagtgtatgatgctcataccactctcaaaggagttatggaaaaagaggatccgggtaactgggaatttgtagtaccgcaaaagttgaaagagttgtataactctaaagactatggacagtacggcaaaaacggtgagatgccggtctgctttattgtaaacaccgacaacacaggaggtaattccggtagtccggttttcaacagtaaaggccagttgataggaactgcttttgaccgtaactttgaaggactgacaggtgatatcgctttccgaccttcatcacagcgcgctacctgcgttgatattcgttatactctgtttatcatagataaatttgcgggagcatcccatatcattgatgaactgactatctgtgaacaatagaaaaatcatttattgaaaacggataatgaaaccgggttctgtttcattatccgtttttcatttcacattattcattagacaaagtcttccaccatatacatttcatcaattatctcattcattgattcttccaggttccgaatagcctcatcaggagactctccataagcattacattgcatatttacagtcaaccaagcataatagccaccgtctgatgcacgttcaagtacataatctgttttattcagtttcatattggtaaataattagtatatgttggtattgaagttatttctgattgtgaagcagccagtttttccaattcaagaataatccgacgctcgcaactgcgtgcccaataaatgaaatcacgatttggaatatattttcccgcaaaacgaagcaaggactccagttcaaacgaatcaccgataattcctgcccctgctatcatagcatcataagcattacaatcctgttcgatatgcgccggaaccattaataccggtttgccaagatacatcgcttcacaaatagactcgaaaccagccgtactggcataagccctgcagttcgccattccattaagaaacttcacatcatcaatctgatgataactcaatgtttcgtccacccgtactacttcctctgtctccgtcttatcccagaaaaatcttaaaggaacttccggatgcattgtgtgaaaactctccactgtatctgcaaaaccggcatttaccatatatccatgaatataatttccttcttccggctggattgccgttatttcccggcgaatcaaaggaggtaccacaacaatctgatgttcatcatcccgttccatttccctgaaagatagagctaacttctttgatgatctaagagccgtcattcgtgtaaagaaacgcaacatccataactggaccggactcttattcggaaactgaaaatcacgatgtagaaacaaatattgatgtccaatacaaatatacggaacagagggacggaagaacgcataggtaagtccggtcagaagttcgtagaagttgatgacgacttccgcccctgtctccttaatccgttgatttatatagtacatactacggaaatattccggtagtttcaataaattataagctaaacttttctttagattcactcgcttattatctgtcgtaggcagaaaattcggactgataaaacgcttcaccggtgcatgaatactccgattgaaaaaacctggtaatgtgcgtgaggaacttttaccgactaatacttctacaacctcatgcccattacgctgcaacatatcttcgagggtgatagcctgtgtcagatgtcctctcccctcaccttgaacaataaataagaatttcatatagcgattattatttagttcataactttaactcccgttacttttcgatatgcaaaactcccgttttcagattacaacagaatgactctccggttactattcgatgaacaaaaacagcattttcccgttatattaataaaatagaatctatatttgcagtcttcaatgactgtcatttaattttaagaaaggaaagattatggagaaatttgaagatttaatacaatcaccgatgcccgttttagttgatttctttgcagaatggtgcggaccatgtaaagctatgaaacccgttctggaagagctcaaattagttgtaggtgataaggcccgtattgtcaagatagacgttgaccaacatgaagacttggctacaaaatatcgtatacaagctgtaccaacctttatcctgttcaaaaatggagaagcggtatggagacattccggtgtaattcatagcagtgaattacaaggggtaatagaacggcattatacataaaaagataaataacgaatgaagaaagtattagtcatggtagcactcgtcatggtaagcgtaatcgtatacgcgttcaatgacagagctgaagccaaacaaggtaaaaaagaagtaacaggtaacaacggagaagtcgtcgtaatgaataaagaaatgtttctgaaagacgtcttcgattatgaaaagtcaaaagagtggaaatacaaaggcgacaagcctgccattatcgatttatatgccgactggtgtggaccttgccgccaaacagctcctattatgaaagaattggcaaaagaatatgccgggaaaattgtaatctacaaagtaaatgtagataagcagaaagaactggctgccctgttcaatgcaacaagtattccgttgttcgtattcatccccatgaaaggagatccccagcttttccgcggagctgcagacaaagcaacttacaagaaagcaattgatgagtttttattgaagtagaaaaaagagtgtcgatatccggtcaggattatgacgccataagaagcaaagagtgacgttatccgtatgtgatagcgtcactcttttttataactagtcaagagattcttaagaagtgtaaaaatacggctatttttcttttattcctcaaatccgcaactacgcgcctaatatgatacagaagcgaaaagaatctgcatcgttagtaaaaagggggcacagtgcatcgaatgtcaccataaagacatataaatgccccttaccccaccatgcgacttgaggcaatacgcaaaatcacgactataagttgtcggtgttatccaaagtcattctggaacacattggcataagcattgttgcatgaatagatattcagcacatacttccttgatgtcctgacccatttggctggcacagagatgaacttaaagacaaacgtcttgatgcggcttgttgctttgagtccgaacctcttcacgtcaagcctcgccatgatgaatttatagaagttgcgtatgagtgccataagcagaagaaacaccgtgttttctcccataaaggattttggaagcctgttccagccgaatccgttattcatatcatcgaagatgcgttccttccctccacggaggttatagaattcgacaatctctttctcggaagactcgtagtcatttgtaaggatgcagcggtaggtgtattctccttcccacaggtcgagttcgccgtctatccgcttctgtctttgaatcacaagacggtatgccttccctttccatttctcgatgagaatggaggccagctcaaactcaatgccgcccaattccactttcttccaacctctgagggcaaagatgtcattgtagagcgaactgcatcggttagcacggatatagaaggtcttgcagtgtttagcaatctcttccactatctcttcagaacacgagccgcaatcagctctgaaacggttgataataagcttgttttgttcaaacctttcaaagaacctcttcagcgtgtccttctggtggaaacggacatttgtgttgccgtcgctgttctcaatgccgacaatcaagttgccaataaccgccacgccagggcgataaccaaggaacttcttgtatgtaggcttcgcatcaaacttctcagcctctatgaactggtggtcgaagtcaacgtcatacccctcgccctctttcagctgccctgtggacaataggcaattgaggagcagtgtattcagcttgtctgccgtgttgaagtcgtaggtcttgccagtgtcggatgtgtaggaaatgttatcctgggtcagttcctttatggctctaagaatcgtgtcggcactgcatgtgcgaagtgtcggatgaagcgaaaggtggtacatcagatgagtggtgacatcctcgatgcatgagccgccacaaaaataaacgctcataagcgaacggatgatttcgctgtattgataaccatacagcctgcatctcataccgagggttgagtcgattacagatgagagtctggagtcaaattgctccattattgaaaatattcctccaaaaggagtgagtttctcggatttaattgctacctttgccatgtctgtcgggtttgatacatattttgatttgcaacactaagataggtgaaaaatctgacatggcaaattcctgagcaactttttgttgctcaggtacttaaaaagttatatttgtaatagtgttgcggaattaaggttattcaaaaagaaattgtacttttgtcaaatgggaaacacgatatcctttagaatatgaaaacatcctttttattaaaaagctcattacttgcgactacgggagtttatatccttccgcaacttctttttgcccaaacttcaacacgtcctcatatcattttaattgtatccgaccaacatcgtggagatgccatgaattgtatgggaaatacttctgtcatttctccgaatatggacgctttggcagaagacggtacactctttacaaacggttattcttctacccctagtagtacaccggcacgttccggattattgaccggactttctccctggcatcatggtatgctaggatacggcagggtagccagccaataccgttatgagatgcctcgtatgttgggagacttaaactactacagttttggcattggtaaaatgcactggtatcctcaaaaggctctgcatggattccggggaacattagttgatgaaagcggacgcgtagaaagtcccgattttatcagtgactatcgattatggttccaaatgcaagctcccggcttaaacccggattctactcatatcggttggaatgaccatggagcagctacttataaactcccggaacgattgcatcccacagcatggacaggagaaatggcttgcgaaatgattcgcaattacgaaggtatcaataaccaaccattgttcttgaaaatatcctttgcccgtccacatagtccttatgatcctccccaacgtttattggacgaatacgcgaaccgggatatacctgcaccttggataggagaatggtgtaaagataagccgtatgccaaactaaaggatcctcaaaaagtgaaaaaagatgctccttatggtaatttcggtgacgaatatgcaaaagactcacgaaggcactattatgctaatgtgacatttattgacgaagagataggtaaagtaattaaaactttgaaagaaaaaggtatatatgacaatgcgcttatctgctacatttctgatcacggtgatatgttaggagaccattatcattggcgtaaaacgtatccttaccaaggttcggtacatgttccttatatcgttaaatggccggctagctatcactttactaaaggaaacaaaattacccaaccggtagaattacgtgatttattaccaactttccttgaaatagccggaagttctatcccgcaagatatggacggtcaatctttactccggttaatggaaggtaaaaccgatcaatggaggaaatacatagatttagaacatgcgacttgctatagtcctgacaattattggtgtgcattaaccgacggaaaaataaaatatatctggcgttttcacaccgggacagaagagttgtttgatctctcgaaagaccctcatgaactaaagaatgtagtaacagataaaaaatacaaacagcaattaaatgagcttcgtcaagctatgattgatcatctttccgaacgtggtgaaaagtttgtgaaagacggtaagttacaggtattaaaacagacaattctttatagcccgttatttcctgataaaagtccggtagataccggaatttaaaaattaacatctatgcaaattcaagacgaaagttatattaaatggaaactttttctcgaaggcaatgatgaagcttatagttggctttatacacaccatattcaattactgtatcaatatggattacaaatcactcctgacacagaagtgataaaagactgtatacaagatgtatttataagaatatacaagaataaaaataaattaagtataccccaaaatgtaaaaatctatctgatgatttctcttaaaaacagtatctataatgttttcagtaaagagcgttcagaagaatcctatgccttcaacttctactctatggaagaacaatatataacagagaatgattttatcaatgaagaagaacgtcgcgaacaaattaatgaaatcaaaaaaatactccatgtgctaactcccagacaacgagaaatcatatattatcgttttatagaagaaatggaatatgatgaaatatgtcagattatggacattaattatcaatcagcctacaatttacttcaacgctcactacaaaaagtaagagatactttcggaacacctgaatgcatcgcatggataagtatcttgaccactttcttcagagaaacacaaaaaatgcattttctttaaaaaaaatataagttcagtgagtagattccattttttgagttgtccttatataaacaacgcataaaatggattcaaaaatagactataataattataaagcagactcattactcaatgatgcttattttttagaatcggaacaacatccgactccggaaagtattatgttttgggataaattagctcaagaaaacaagcagttagctaaggaaatagctattgcgcgtaattttctacatattctccgtcatgttcctaaaccctatctgcctcaacaaaaagtagattccatttggaaatgtatatccgatcagaatcgtttggaaatacagaacaaaagaaagagactcattctataccgcactttagctgcagcttgcattgttgtcttccttgtaagtggttggtatctgcaaaatatttatcagacaagcgagtgcatggaaaaatctgatatagtcgcagtaaagaaacctgatgtctctaccaatcaaacccttttgattctatccgaaaagaaacagatagctatacaaggtaaagaaagtaagctacattacaaccaacagggaaaattaaatgtcaattctcaaaccattaatcaggaaactgaaaacgataagaaaaaagatacttataatcaattaatagtgccggccggaaaacgctcgtcaattactttttctgacgggacacgtatttggctaagcgccagttcacgagttgtttatccggttgaatttatgaagaacaaacgggagatttatgtagaaggtgaagccttcctagatgtttatcacgacaaaagtcgaccatttattgtaaaaacgaataaaatggacatacaggtattaggtactacttttaacgtttgtgcatacgaaaaagagaatatacaaacagtagtacttgtcactggaaaagtagaagtaaagactaacaataacgaaacgaaaactttatcaccaaacaatttacttgcatataatgatcagcaaggtatcagcgtacatcctgtagatgtacaagaatacatagcttggaaagatggattttaccaattcaaaaaagagaggttggaaattattacaaaaaaactcagcaagtactatggtaagacaatcattaccgacaaacagcttgctaatattacttgtagtggcaagctagatctgaaagaagaactagatgatgtgttgcatacgctgattcaaaccgtcccggctcaaataacagaatcaaatgagaaaatctatattaatgtcaaatctaaataaattaatagcctatgaaaatatgacttcctagaaaatgataaggccggataatacccgcatatcacccgaccttaaattaaattacttacacgtttaaatattaataatctaattcgttataaaagtatggaaaaacaccaattattcagtctaaaaaagactgaagaaaaacaattattgctaattatgaagttcttttcattttttctactgataggaataggtcattgcttggcaacaaattcgtattcgcaaagcaaattattcacaatgaagacctctcaaaagactgtgaaacaagtctttcaagaaattgaaaaaaatagtgaatacataattttctacatggaccaaatcatcgatacgaatcgtaaggtaaatattgatgtaaaaaatcagcaagtgagcgctattttggaccagctatttctcggtacagataatacttacagcatcaacgaccgacaaatcacaatttaccataaaggcgaacaaccaaacagccaacaacaaagtaacaaatttatagtcaccggtgtaataaccgatgcacaaggagagtccatgattggcgtttcagtaaaagtaaaaggaacaacattaggaggaatctcagatatggatggacgatattccattagtgtccctaacaaaaatgatattcttatagtttctttcctgggctacgcaacagaagaaatcaagattaacggacggcgcaacattaacatccggttacgcgaagacaccaaagcattggacgaagtagttgtcatcggttatggacaacaaaaaaaagagagtgtcgtggtatccatgagttcggtaaagccttcggaaatcgctgccccgactcgaaatttgaccaacaatttggcaggacaagtatccggtttaattgccgtacaacgttccggtgaaccaggatacgatgatgcagaattctggattcgcggtatcagcacattcgcatctaacagttccgcatcaacccctttagtcttagtagatggtgttcctcgtaaaatcaccgatattgaaccggatgagattgaaacattctcagtattaaaagatgctgccgcaactgctatttatggtgctgaaggagcaaatggcgttatattagttacaaccaaacgcggtaaggacgaaaaacctaaaattacatttaaaacagaacactccatttcaagtccacaacgtctgcctgaatttgtaggttctgctgattatttaagtttatataatgaagcattaaataatgacggggaacccgatttattcagcgctgaattaatagaaaagtttcgtactagtacagaccgtgatctttatccggatacagactggataggtgaactgcttagaaagaatacacataatcaccggtatacattgaatgtgcgtggcggttcggcacgttccagatatttcgtatctggtgcctattatacagaaagtggtatatataaaggtaatcctacagaaaaatacgataccaatattggcttggaccgttttaatctgcgttcaaacattgatatggatgtcacctctacaacactagtatctattgacttggcaggacaatacttgataggcaattatccgggtgaatcttcatctactatcttccgctctatgttgattactcctccttattgttttcccgcagtatatagtgacggaacagtagctacttacgaacaagaacgaggtgtaaatatgaggaacccatacaatcagttgatgaattccggttatacccgccaatggagaacaggtattcaatccaaagttggcgttagacaaaaactcgatttcatcaccaagggacttagcgccaaagtaaatgtcagctatgactttgatgcaacattcaaatccatacgttcatacaatccttcccgttatcatgcaacaggtagagatgagaacggtaacttaacattcatccaagttgtatcaggaacaccggatttgagcgatttgaaggacaatggtattgaagcgcaaaagaaaatatatattgatgcagctatcaactacaaacgtatttttgcagagaagcatgatgtaagtggtatgttgctatatatgcaaaaagaaacacaactcaagactcaacctctcccctatcgcaagcaagggctagtagggcgttttagttactcttatgacggacgttatttccttgaaggaaattttggatatacgggttcagaagcatttgccaagaatcatcgtttcggttttttcccggctgtaggactggcttattatttgtcaaatgagcctttttaccccggagttttaaaaaactatataaacaaaatcaaattaagagcttctgtcggtaaaactggtaacgacactaccagtgaccgttttatctaccgtcctactttctctatgaatgcaggttcatggtcacaaggaataggtagtaacggaggtactaattctataggacaaggtatcatcgaaggatttccggaaacgttagatattggttgggaaattgagaaaaaacaaaactatggtttcgacttaggacttttcaacaacaagatagatattgtattcgactatttccgttccgaaagaagcaatatcctgatgcaaagaaaaacgacaccaacattaagtggttttcgtgtcaaccaatatgctaactatggaatcgtatccaaccatggtgtagatatgtctttgaatgctcatcatcaaattggtaaagtaaaactaagtgcaagagggacatttacatttgccagaaatgagataaaagaatatgatgaattaccacaaaaatatccatggatggaacgaacaggtaaacgaattaatgaaaataacctctatatagccgaacgcttatacacaaaagaagatttcatcatcaataagaacagtaatggtattgaaagctatacattacgcccggaactgcctcaaagcactctaggtggattgcttggccccggtgatattaaatacaaagatgtgaatggtgacggagttatcgattcctatgataaagtagtaggcgtgggacatcctaatgtacctgagatcgtttacggatttggattaaacatcgaatataaaggattttatgctagtgtattcttccaaggtaccggaaactgttctgttttattaggaggaaatactccggaaggttggtatccatttgcatggggagtagaccaatccagttatcgtactttcgcattggaccgttggactgagagtaatccaagtcaaaatgtattaatgccacgcctacataaagataatgccaacaacgccaataatcaagtggcaagcacatggtggcttcgtaatggaggtttcttacgattaaaaaacatggaattcggttatcaactgcccaaacaattcttgaagaaatttaatgttcaggctgccagaatttatgtaatgggatataatcttgctttgtgggatgaccttaagtatttcgatccggaagcaggaaatgcaaatggaggaaacgtataccctaagaatcgtacctttaccttaggaatagactttacattttaattaaatctataaaatatgaaaacaatgaagaaactatataagaaaatactgatagctgcttttgcattgtgcaatatttattcttgcgattatctgaatgtatctgatgagttagccggaaatctccgttcattggatgaaattttcgataatgtatcttatacccgaagatggtatgcaaacatatttacttctattccagattattcaggaattaccgcagctgctggaagtatcacaggatttaaaaatccttgggcaggtatgtgtgatgaattaactgttggatatggagatgcaaaactctataacaaaacagataaaaatgcagctaacatgagttttcaccgttggggtacatgctataaagaaatcagacaagcaaatatattcttggcccacgccaaaccaatagcggcaaatggaacccatgttgatgtactgacggaagaagaactaacagagatgaaggctaatgtaagattcatgagagcctattatcactatttgcttttcgaacaatatggtgctattcctttggtaaaagatttaattctcgaaagagaagataatctggatctgccccgaaataccatagatgaagtaatcagctatttggacgaagaactaacagcagtagccaaagagctgcctcaaaaggcattacatgatgacgaccagcataatgcatggccaaccaaaggcgtagctctggctgtaaaagctaaaatgtgggtatatgcagccagtaagttattcaatggcgaatacaaagaagcgctagccgtaactaatttggatgggacaagactttttcctgataaagatcctaataaatggaataaagcggtagctgctttagaagaattcataaaatttgcagatgaggaaggtaattatgaattgctgaatacgggtaatccttcacaagatatatacgatcttttccaaacatataataaagaaattatatgggctactgcagcaacttcatggggtggaatgacaaatgacatgttcgaccgtagatgtaccccaagaagtgaacaaaacggaatgggttgcattggtgtcacacaagaactcgtagacgacttttatatgaaggacggtctcccggtacaagcaacaagttatttaccacaatccacattatatacaaccgaagggtttgacaaatacactgagactgttaaagccggaagcaaagaagtacaagtggccaacaatgtcagcaatcggttcctcaatcgggaagcacgtttctataatacagtatttttccaaaataggagatggcatgtaacaaacaacgtaactcaattccacaaaggaagccccaatgaattaagcggcacaatttatactcatactggttatatgctatacaaaagatttaacagggaagttagcatgaaatctccgggggttcaaaacaagttccgcccttctatcatcttccgtcttgcagatctttatttattgtatgcagaagctgttaatgaaattgatcctcaggacgaacgtgttctgacctatttaaacaaagtacgccagcgtgccggtttgtcgaatattgaagaactcaaccctgccattgagggaaatcaagagttgcaaagactcgcaattcaacgtgaaagacgcatcgaattggcaacggaaggacaacgttatttcgatgttcgccgttggatgatagcagaccaggatggagaagggcgtcaattcggatatgttcatggcatgaatatgaatgcggcagaagacaaattctacgaagaagtagaagctagcccgattgtcttcagacgtaaaatgtacttatatcctatcccagacgatgaaatgaagaaaactgaactgcttgttcaaaatccgggatggtaaatcaacattatgtttcatgacttaaaataaaaaaagatgaaaaaaatatactccatactggtaaccatagtatttttgatactgacagcaagttgtaacgagaactttgagatcgcagataaagcagatagcctagtatctgttgctatcaatacactgaatatacaaaaatcattcaatgtaggagaaagttatcaagcagagctttgggtacaacgaggcggattaagcgatatgtcaggaaaagtaaaattcatgatagatcccaatttactagactctctgaacagagaagacagaaccaattatcaaatgttaccggaaaactgttatgaattgtccaacattgaatttttactaaataaaaatgaaatgtgcggttatataacctatcatcctgaaaaaatagtcgaattgtccgattatgaccagattcaatatgttcttccactgaggttggtttctaacgaactaaatatcaaccccgaaagatgcgtttcattgttggcatttcaggtatcagaacctattgtacaaatcacaaactcaggaatattcaatatagatccgttacaaacctcccaaatggacgtccacatcagcgtaccttttactaataaatgggatatagaatgcgatttaacccacgatcaatctctgattgaacagtataattcaaacaataaggttaatttcaccttactaccgagtgaatcgtacacagctccggataaaatttctttaccggaaggagttaatgaaacaacagcctcctaccaactcaaagataatctacttccgggtaactatatattgcccataactattggaagcattgaagcgacacagaacggcactccgaataattcattagttatagataaggaaagtagcactttattccgtatcgttaaagaagggaagaaaatagataagtcaaaatgggaaattattgcttgcaattccgaagcagcagccaatccggtgaaaaacctaattgacgacgatgaaacgactttctggcactgtaaaactaagtctgaagccaattggtgcgaacctccttatgaaattaccattgatatgaaagacccgatcacaattgctcaaattgatttagtaaaccgtggagaagctagtagagctaataatatcaaatgggtggaattttatgccagcaacaataatagtaattgggaaaaaatcggtgcttctgacttcaatgatgaatttattagagaaacatttcgatactatgtcaaatcgaccacagctcgttatttgaaactagtcattcctgaaggccatggaaatgcgtgtccccccgcagcaattcgtgaattaacagtcttcgggtattgagctaaaaactcctactaattaaaagagacgacctgaaaaagaaatgtaccccaaaagtttatcaaaaacaattggggtacacttcaattactccgaaatagttttagaatcctgtccagttttttattttagatatcctataggatgattcatcattggtacctggctttccttcaatttcaacaccttcttcaattgattgatatctatcgaagcgcgaggtacagtagccaaccttgcagcggaacaaaagattgaaatattctgggaaacgattcctgcatccatagctcccatcaactgagtatgtgcattcttagtatctccaaaacgagaaagatcactaaccaaaactaaagataccggagctgatattacaaatgcctgtccacctgccactgctccacgataatcgccttcagctatcagattcaactgatgattttttgcatcatataaatagctaccttccggcaataccacatatacatccacatcctgcttattcaaagccgacggagcagtccgttttccagaatcgctccgattaataccgttagcagcccacaacaaatccgacaaatcagataaattcaatgctttcgaagcaaattcacgagtagaatgacgttcggacaatgctttcatcaccgtaccagtacggttcaaattaggttttggtaacttaattactttatcagcagcaaatgcagctaccgagaatactaaacaagctaacaacagttgtacttttctcataattgtgatatttaaaagttgatgaacaaatatagacaaaaaaggtctgcattcatttttgaatacagaccttttaagagttattatgaggtttgattatttatcgccgaaataacggttatacagaccttcaaaacctttaccgtgacgagcttcgtccttgcacatttcatgtacagtgtcatggatagcatccaaatttaaagcttttgcacgagttgcgatacgttttttgtcttcgcatgcaccttgttcagcatctttacgtttctgcaggtttgttttggtatcccaaacacagtcacccagcaattcagcaaatttagcggcatgttcagcttcttcccaagcgtaacgtttgaaagcttcagctacttcaggataaccttcgcggtctgcctgacgactcatagccaaatacataccaacctcagtacattcgcccatgaagtgattgttcaggtccttaatcatttcttcgtcgcaaccttttgcaacaccgataacgtgctcatcagcaaaagtcaatgcaccaccttctacttcaacaacttctacaaacttgctggcaggagctttacacaaaggacatttctcaggagctgcgtcaccttcataaacgtaaccgcaaacagtacatctaaattttttcattttcttctcaattttaaattaattagtcaatacgtgtttctttatcttttctcaagcaattcttacatatacctttataataataatgcacttccgacacctgatgtccgtccatttccagactctctacttttttcaccgcttccggacattgcaggtcataaatgtgtccgcaacgtttacaaagaaaatgggaatgaatggaagtatctgcatcaaaattagtatttttctcatcaattgtaagcatctgagccgctccttgctccgaaaacagtttcaaggtattgtaaactgtagtctttgaaagcgtaggcatcgaaggagataatgctgtataaatatcatcagctgacggatgaataggatgctccatcaaatattgcataattgcaatacgttgcatcgaaggctttatattatggtctaataatcgttcgtatggtttcatcatttatccctttctttccaaacttgtattcattacaattataaatccaatgcaaagataaagagttatttggaataaacaaataaaatatgagaaaaatctaatgaaaaacattacttttgctgtactataataaaagaataaacatgaaagtcaaacatactgcaattatatatattataataggcctatttcatattttacctatccaacccaaagcacaaaacaaaattgaatttaataaattaattaatgatctaggtactttctctgaagatagcaaacccaaaacttgtacattcaaatttaccaatcatcaggcaaaagcgatagccatagcacacgtgcaaagtacatgtggctgtgctgttccacaatatacaaagaaagccatcaaaccgggagaaagtggggaaattaaaattacttataatccgcagggccgaccggggatcttcaaccgagccattctcgtcagtttttctgatcaaactgaaaaaacacgcttatttgtaaaaggcacagtgacacctggagtagttcgaaaagataaatcctatccatatgttatgggagacttacaattacgaaccaccggcattaaattaaaacaaatgagaagtaatgtacagcaacaaaatattatggttgtcaacagtggtaactctcccctttatacaataatagaatcccaaataccctacgtatccgctacaatggttcccaatattttaaaaccgaatcaaaaaggagaaatccaacttattcgttatgccgataaagataaagaccggactatttgtatcagattaaaagaaaatgcccaccaacagaacgtggcaggcaaaatttctatcattatcacctcagaaaagtgtactcaataataactaatgatacggtttactttaactgaagaatcaggatgtgaccaatctaccatattattttgttgctgtacagcttctgtccaattaccgaaagcgtccttccgagtataaatactcaactcctttgcttcggcctcttcttcaaaatgttccttataagtaatttctgtccaccagttattatcatcatatttataagtccagtctaattgcccacccgcatcagtcagtttggaaacaggtaacaatgtagatgccatatagcgtaccacagtacgttctacttcattttctccttccttcacaatcttatcagatgatgctaagctaccatcttcgttataaagataagatgtaatttccatattggcaattactcctcctctttttaatgtgactatttttcgaacaggatacataacaccctcatcatattcaaaagtagtacttgtcacaccactccaagactcagtagtatatatagctttgttaccactatacgtatataagacactaccgtccgcatcagaaatactttccagccctttcactaaaaagaaatcataaatacctaaaggaaagattagaggaacaaagacttcatgttctccataagttaacgtataaatgacaggatcaccactgaaatcattcacaatgaccttcaccattttaccagctttatcatatccataagaataacaagccatcacttgccacacatctcgggcgtatattgtcggttcaatactcgtaggattataatatattaaatgaccacttatatcaaatttccactcggaagaagatacagcttcttcatctttactttgcctctcaaaaggtacaatataagaagattcttttactgcgtttacttttcctttccaacccatcattaccagatgcgattgttcctcccaaaaagagataactgaaggctccgaaggaataatttccggagcctccagttctgtgtcaccacaagaagtgatgacacatataagaggcagaataaataacaacttatttaatattctcatgcagtttacttatcctgattctttttaagaccagcaataatctcttcaagagtttttgggaaagaatacactcttggttgaccatccactttacatacagggcactcgtgacgaactacattcttcgaacctcgattgtatacaatcacatttctgacaggcaactccagttcttccttattccatacatagaaatttttgatacaacaccaagtttcaggaactttccaagtcagattcggacaatcatccacattcacgcaattcaaataatagggtttcgcaatattctgtgtttgttcgtcaccgtactcaaccaccttgtccccaacaagttttttatttcggtatttaacggtttgatctattactgtaaaacctgcatgattagaaaaagttctcaactccgtatttttagaaagatctaaaatagcaaacttagtacaattcgtaaacgtaccatcttttacttctaatatttgattactattcaatgacaagacgcaaagttcgggcagcttcgataagtccggtattgctgtcaatccacaattatccaagctcaactctatcaatgaagatgatgccatctgtgggaaagaatttattttattatcatccagaatcaaggtcaatagttgatctgacaaaccattcacgacttcttgagatactgaagttatcttattgttagccaaagataatgtacgcattctcgtatttgctatttccggaatagaagtaaaactacagttatcaaggaacaaaccacccatatatgtattatcaccacgatatttaggtaaattgctcaatccctggttatcgcagaaatcaaaagttgaaaccttcttcattccaaagatattttccggtagagaagttagctttgtatcattcatacgtaacgaaacaaccttttgccatttttcagccagttctttcggaaattcagcaatttcatttccactaatttccacatcacgaacttccggaagttcactcaaacgtataggcaactctgttaatttactattaataacacttaatgaacgcagattcttcatcttctcaaaattctttgggaaagctttaaatcctgtattcataatcataattgaataaagtggcgatttatccatattatctggtaactcttcaaactccggaatatccataatctgaattccttcaagagttgggaataagctaaccgtagcaggtaacttcttcatacccgggaaagtctttccgtcaaagataatacatgccaaataagaaatttctccataatcatctacttcaaactccaaattctcccatgttaacaagtcttcattttctacacgccaagacttcggccattttgttgaatcattcccaagtgcttcggcacaaacgccgaaaagcatattacgaatttcgttattgatatatacaaaacggattgaaacaggaaaatagaatgtctgcattacaccatgttcgaccgataatgtattattatcatccaaatacgcttcctgtacttgcacacctttattattataagcagtatacttcaccaccttataatctccgttttccaatcgtactgcagaagaagtcaacgaatcaatatctccaatcaaatcaatagtcggaagtgtaaccttctgcccatctttttctaaagttactttcaaccgcgccatatcctctaatgttgagattgtatatactttattgcgcacgaatttgaaagtcacttccccctgcccttccggcaggggagttactccatcattatcgtcatccgaacaacctacaaatatagttgcacagaacatcaaacagagtaaaagtgtattctttatatatgttgtcatatttaccatacattattaaatttagtaccccaagtctcacctctcaacttgtaatatctccaatgaccattcaagggtacagtttcaatatcttctttagtcaaagaaggcaactttaaagctgttgttattgcatcctcgtctccatcatccggacaaacacgattatttgctccttcagggaactctgacatcttagcaggttcattgctaaatccggctaacttacctaaattatcgtatccttcctgattaaataaaagaataaacggattccaacaagctaatttaggatgccacaaaatccaatctggtaacttacctgtaaaccggttcagatttaaggaaagcattttcagattcggcattatattatgcttgccaactcctcctatatatcccatatccggaatacttccgtaaaaatagttataggagagatacagatattccaaattatccatttcaaagatttccttaggtaaatttccacccataccaatcgtttccaaagtatatttcttcggaatatctgtctgcagatttaacacagaaccacttacccggttaccaccaaaattcagatatttcaagccggtcattcccttcaaaatatccattggcaattttaggaaattattaccattcatatccaattcttcaagctgagtcatatttttcatttcaggagggaattcactgataccatatcccattaatgacaaactcttcagatttttcaatgttgtaatctccggacctaacacaattttctttgtaaaagcattagagtttccgacagcagagaatgattccaactcagtcagatactttatttgataaggaactgattcctttgtatcaaacatagagaatcgtaatgaaatcacacgtacctcagtactatctttatcgatatcaccataactataatggtaggtacgttcttctgtctccacattattccagtgagtaataggacggctcgtaacccatcctgatccatcaagatttaaagtacggctcatagcaagtaaagccaatgaatcaccttcacgagacggaatgataagaggagccttttcttgtgtaatagttacaattttctttaaaagctctttctggatttctccggcacgagttataggctttcctgtctgattaaattttatctgtgcagaacgcactttatcaaactctgtataagtcttaaatctaaaacggaatttctgcttacgaggaattgtcgttgaaggagtatatttagattctccctccaaagtaagccagtctaaatcttcaggagcaactacttcaaatgccacatttgaagtagcttcaatatcaatgtaagatttatccaattccgcataagaaggaatagttacttcttcactagttaattgtatagtcggttcatatcccatttgattgatagctacctcaacacttttaccactttccgaatagaaagtaattttcccataacgttctttatacagatacgaagagtcagccttaataacacaaacgacactacctactccattagccggagtcaacatacaccagtcattctcagatattgctgtccaagtttcgtcagtagctacctttatttcaataactcctccatgattcagaaatccaacttcagtctgatctagcgcaaaacctgtcacggtagcctcatcatcatctttacaggaaaccgtcagtagcaatgtgccggcaatcattgccaagcacattgttctcatatttttaaataaacaattcataattatatgtttcctttttactatttatttatatccaaatccaaaatcgaacatccccaaatagtttgattcgaatcaaatcctaatgtatacagcccactaccaatcttcgagcaaacatcgctaggtatagtcatttcaatatttggattttcagagacattgaaagcagttactaatgtaggatatgaatactcttctattttttgaatatcattataagatatatccaacaagcgtaaagttgcataagccggataagtagaaagaccagtcggccaattcttcaaacagcgtatctcttttttattgccacgattatcctcaactatatctgactggtctgtcaaatatagtttattcaacaatggcaaagtaaacgcctgaagcggaaatacactaaaacaattgtaactcagattcaagccagagacataggccatagtacgtgtatcaaattctttcggtaaatagcgtaaacgatttcctgacaaatctaaagcctccaaaatatccagatttttaaatgattccggtggtaaagagtctatctcacagttctgaagtaccaaatgacttatctgagatttagtttcagacagttctttcggcatcatccgacgcagtttttttcctgaaccagttttataaccttcaccaagcggatttttactcaaggttagagtttctgcacggatacctaaaaatccttctttaaaatgagtgatatgattatctgagaaatcgacactagatgcagtatacttgctctttgtaccatctttaaatagattagggaattctgtcagacaattattagaaatagagaatttctcaatatcatctgtttcacaaaaatcatctgcaataacctcaatctgattgtgatcaaagaaagcttggactggagcaagcctgcgtttcgtaccatccagtttcttcaatctattactagtgaaatcaatcaaaccaatctttgtcgcattagctaactcttccgggaacttttccagtttacaagatgttacatagagtatttgtaataccttattattactttttacaaatgcattcaaaccattatataactcgtcagcttccattgttgcattacaactgaaattcaaagagacaacacttgtcattttagtcaatacatccggaaatgttttaaattgacagttataaaattccaaatctgtcaaagcaggcaaatctttcaacgctgtgggcaaatcactcacacgaccgtttgctacatacaaataagtaagttgttttaaatttccgatagtttccggaatagaagtaatacgatttgagaggcttccctgtgcaaaatcatacgtttttcgagtagccaaagtaactctttccggtttcttggttgtataaatccttgacgttgaagtagaatgtaatattgcagaacgttccttagcaatctccatacgacgggcacagatatcaatgcctctccgacgaagttcgtacgtattcaatacataatacatatcttctgtattttctatactagctgcatcattatgagtacctaaccacaatgcttcaagttccgtcaaatcacccaaagcatcaggaactgctccttccggattaaaagaacctatatctaatgttttaacacgtcctgtattagatagttccactcccggctgattgccccattcgtcaataggacgatcggcaaaacgccaattggctcctgcagggaaagactctccctgatatttccaattcggaccatccatatttatccagatattgtacaaggcaagatagtcctttatagagcgcatattctccggataagttacagtaaaagacgcttgggtatacataaccggggcaacattgacataagtatctttcaaatcaccagccaacaacatattagtgcgtttatcactatacaacatatagcgagtaatttcatattcaccagcctcccatgtagaaacagtatcagtatgcaggtatttctcacccttttttgtatatactttaaatgagtgataatcaacacgttcactagagcctttctttttataataaagatcaacttctgctatatcatcataactaaatagttctggatcttgatcgaatgctctggttactccttggtttgctttatctgtttcttccttataattagaaaggtctttaagaatatcaaagtaaaccttcccatatacagaagattttacttgaagattgacttcagtcacatgcccattagatatagaaaaaggaacaacctcatccaaataaaccgtcattaacatttcgggggtttccgcaccaggtttagccgtgccatacagaatataactttgcattttatattctccagcacgtagttccaacttttcagattctaatcctagttctgcagcaccttctgcagaacttaaattcaaagactgagtcacaggtaaatctccatataacatggatacctctaccttcctaacattggagagacttagtcctcctgcgcgtgtcgcagtcgaagtttgtggagcaaccatcagttttaaatatcctgctgtgccattggaagatatcacatcatcatccgaacagccggcaatcaataccaaacagagcattgccgtacacaatccatatatttttcttaatagattcattattttatttaaactataacgttttctgaattaatttgcagtttggactaatgtaaaatgaactaatacatatcctggatttgttccatcattcgcaacaatagcatacgtatattgacgttcctctccggttttgttctctccaacctcaaatactatcttctcctcagatatgaaagtaccagtaccccaatttataagcataggtgaaatagtaaaatcataatcatcttccttattcagtacctgatgatcctcaatagataaatccttaccaacaataaaactaggttgagcagcttccatgtctaatccttcataagaatactcatattttttacctgccgccggtacatttattacaacgttattaccatctaagccttcacaccagaattggctaaaatccaactttttgcctttttgaccgataataagcatattatctcgaagcccttctcgcaattcatcatttccatcaaacaaagaatatacatcaggatattctgttccagaaactatgaatatagcacagaaacgatcttcaagcggtgttggatcactccattcatccgttccacgctcacccacactaaatatagaagttgttttacccagcttaacacgagtaagttccgactcattatggttcatccaccaaatctcactagtatatactctatccatattagcatcatatttaacagcatatattgcaatgtcatcggcgtcactagctgtaatttcaactttcatatcactaaaagattcttcctgattagtccaggtaccatctgcattaaacataaaatatggatacatatctgaaggatcattatccttgaaaactgagcgatcgtaagttacatatttaccaccgactcctgcaaactcaattggtaattctatattatccaacttagtatcagttgtagcatctttgaaagttaaaacagcattcaattcatctgtgtcaatttcactattttttagaaccaatttaattcgagtagaaacaggcaaaaatttagccgattgattatcccccagtacctcaacagattcaacaaattctggtttttcgtcaaaatcccatgctacatttgaatatacagtagcaagacctatatactcaccatctccattttgattaatcaattctactttatccacatcaaatgtcaaagatggagtaattcctttaaagtccaattgataatcgacagtagcaggtgtacgagttgctgatgtatattcaaaatgagccacagcactttgtgccccatattttccagtctcataaagtttatcaaaatcagcatagaaagtcactgtataagaaccatcttcattagcatccgctgcttttgaatagctcagccaactcttatctgtgtttacagtccaatcataattacttgtaacatttacagtcgcaacaaaagctttactatcatcacttatttgaatattatcaaaagtctgtccgttttgactagcgcttgagaaaaacagaatagtacctttagatgcctgcttcacagaaatagttgcttcttttcctgtacttttatctttaatggtaattgtagcagggcgaatatcaaaactttcattctcatgaatagttgctgtaagagtgatatcaccagcagatcctgttaatttattcaacttcaaccaagtagcactagaggctgctgtccaatcactaccagctgtaaaattaatatcaatagtagacccttctgataaacaggtaatcttatcaatagtattcaattgaatgccggaagccgaggaactaccaccttcatttttttcatcgtccccacatgctgcaaacgcaaccattactacgcataaagcgagaagctgacgcaaataaatcattgtcgttttcatattatctatatttaaattagtacttattcaatttaaaagtcgaagtataactggagaaaccacgtgttgcagctccattgttattatcagcttcttcatcagcatcaatacattcgaaaatatactgatatacaccgaagctaccgatttgcggtacataagcctcgagaatcagcacaaagaaattatcgaaagtattgaaataagaaggatattgttctaccgaacgtacccatacatatccatagttactttcacggaaagccgcttgttcaggaaccgttattctcaagtccaaaggatctttctcatcaaaaataatacgaattttttctgaagacgattcaccaaacatatccgtcaatatcagtgtatgatcatctttcttatatccatgagcagaatattgtcccatactgctatcgaacgggaaagaagcaagcattatcagattcaccttgtcgtcctccttctttattttcaagaattcattcatcttgaacggaggacactttactaaatccacacgtgtagtattcccatataaattccattcctgtgctttaggttcaactaaacgtaaacttacaaccagactatcttcacgtgcaatgtttgtataatgtcctttcaaactgacatttgcgacacgctcaccggcctttatcgttatattattagaattatcaacgaaatcgaaatggagtccacgaacagcagttgatttttcattgacaatctctacagcgtaattgcggtcataatcggctgttgtagtagcagccaccggcacactaaaggtttcttccttatcctgtacaggcatcgtataaaccgtatcagagaacatcacatattcaggtcccgaatatgtaatcccttcatccgactgacaagctaccataataacagccgctaccggagtcgccaacagaagattcaaaaatttcttcatatacatttaatctgttatatgttttgattaattattactagcattaccaaccaccaaaccattggttgcttctatctcatgttttggaataggccaagtagtgaaacgatactttgcatctgtatatttcacttccatttcattattataaggcccttgtaaactgtatagttgcttctgacgtttgataggatcatgccagcgtttcaagtcggacaggcggaaaccttccaaatataattcacgagcacgttcgttctttatttccttcagcaaatcatcaccggaaacacctaatgaaccaaagccactgatgcgcttacgcattaccgaagagaggtctttctgagaattttcatcatcattcaaccaataataggcttctgcacgtaccaaataaacttccgaaagacgaagaggtttcggcatattaacaaatctggggatatctcctccatcaagatctgtatttcccgggtatttggtaatgagatacacttcgtcaccatttacatcttttgttggtgtgcaaaatatagaagcacgcttatcattctcatcatataagtccaagattgcttctgcaaaatgatatctgggattataggtcgaattattatacgacaatagttcttttcctaatgcaccaccataactagtagaactcatgcctattttccaaataacctcgtcacttgcatcacgcatccacatcacttgataatccgtgtaatatttagagtcaataacaaaagcattattgattgcatccgaaagttcatacactcccaacttaatcacttttgtagcagcttctactgatttcttcaaatattcattatttctatcacgctttaaatcccccattcccatatacatatagatacgtgcacgaagagcatatacagctcccttactgaaataatgactatcagccactgtacgtgaatccggtaagttatcttcggcactcttcaaatcactgataatctgattataggattcacgcaaggtagagcgttttaccttcggaacatcatcccgataagtagtaggaagacagatacccatattttccgtatcggcatttaccgaagtcatcggttcacaaaacaaacggatcagttctgcataagccatggcacgtgcaaaatatacctcgcccaaacgctttttgaaattatctttgtcggcagtcgttttcaaattaacctctacctgatccttatagtcaaggaaaaagttacaacgggctacaattgtataaagtccattgtatacagcaattatctcatctgttgtagacttaatatcccattgataaatattagtatagaatccattattagtattcaaagcagcataagccatatccgcctgaatatcggggagcaaagtcatgtagccactatataatgcactatttttaaatgcactataaatgcccaccacccatgcatcgcaatcgtctatcgtacgcaatgcctcatgttcaggaacggcactatctggtgtcaaatccatatcacaagaggtcgtagtaaacaccagcgacatcaataagaatagtatttttacttttttcattttatgtattatattaatgtatagaaaaacgcctagaaaccaacttctaatccaatagagaactgacgtgacatcggataagctgcctgataataattagcagtagattccggatccatgccttggaacttagtccacgtaaataagttctggccttgtgcgaacactcgtacgcgatcaataatcttagtaggtttcagtaaattcttcggtaactcataagatatactcaaatttttcaaacgaaggaaagaagcatcttccaatattcgatcatcaaattgcatcgggacatcataacggggcattgttgccatatcacccggcttcttccaacgatcagtcaacagtcttcttgacatattatagctcgaataaaccgctgcattctcactgaagtaacggtcattattcatcatataacgatctgcgacccaactaaactgcgcggaaacagtcacacctttccaagaaagtgtagtaccgaatcctccttgccagggagcattgcagcttttacctatcagtaccttatcctcttctttaaattcattcgttatttttccatttttatcataccaaagtgcatcaccattagccggatttacaccggcataacgattcagatagaattcgccatacgaatgtccgactttaaggtaaagagcagtagaacccaaatcgtactcatcacgtccatcatacaattccgtgatttcattcatattataagatgcatttgcagaaatattccaacgaaaatctttcaatcgaagaacatcgatatcaaaagaaagatcgacaccacgattgaccatttctcccatattgctccaacggcttgtatagccacccactgccgatacaggtacttccatcaacatatcattagtctgcttattataaaattctgcaaccaaatttagtcgatcaaagaaacctaattttaaagaaatattggttgttaacgttttctcccaagttagtttttcgttccctttagaataaggagctatacctgtcatatcaacatcattaacaataccataaatcggccctccagcaaccagtgcaagatgctcataagcaggaattgatgagttaccagaagttccgatactagcagcaagttgagcatttgtcagccaatccacattcttcaggaacttttctcctttgacattccacatacctcccactgaccagaaattagcccaacgagaatctacaccaaatcgtgaagaagcatcacgacgtaaagagatatcagcataatatctactcagataattatattcagcacgtccaaagaatgaaagataccttgcctcattcattgtatcggtgtaactctccgcacgtgcagcagtcgacattgtcaacagattatcattgctttgtccacgagtgacaacagagaatccatcagactggttatccccccattcctgaccgaccatgacattaaaatgatgatcttcttttatatcaaagagataagttgccgtatttgaccatgttatattcgtataacgtgagaaagcgcgtccaacagttccttcaccgtaattaggtaaataggatggcattgaaaacatattagtacgcatatctaaaaagtcaacacctcccaatgttttgatagttaaccccggtatcggacgaagttcaccatacgccgaagctattattttccaacgatttttatctgaaggattactattctggtactccaacgggttcacattcgttcccaaccaagtgccatcatttatacttgcaacagctcccgtactggcataaggattccaatatggaagcataaaacgggaagctgaaattggagtgacagtattatagtcaccatcaactgcttcactataatcttcataagcaaaagaagcatttgtgccaaccttgaaccatttattcacttttgcttctaaattagcacgcaaagtatagcgcttataatctgaattcaaagcgataccgtcctgggaatgaatattaccggaaacataatagttgaatcctccttgcgtagcaccacctgcttgtaaatcaatactagtaaaaggagcggcatcattatataccacatcacgccaatcaatattggtacgttccaataattcacgatcatacgtacccgcctttcttataccgatttcttcttcataattaaggcgttcagttgtattcatcaaatcccattttccataagccagtttagagataccatattgtgcacgagccacaatatttccattcgtaccgcttcggccacgcttcgttgtgattaccactacaccattggcagcacgcgcaccatatatagaggtagaagaagcatctttcaacacagaaacactctcaatatcattgggattgattgctgaaaaaacatcagcagtaatagcaatgccatccaaaataaaaagtggagttgttcccgcattaatagaattcactcctcgaatctgaaagtcggcagatgcactaggctcaccactactggaaattacctgaagtcccggcgtttttccctgtaaagcctgatcgaaactaggagctggtacattctccaactgatcggcctttactaccgccatggaaccggttatagttcctttcttccgaacaccataggctacaactacaacctcatctacctgctgtgcgtcactctccatcttcaaatcgagacgagtagaagcagttacctgcttctctatcgttttcattccgatgtaagaaaactgcaaagtggcgggagatttcgtcactttaatactgtaattaccatttacatcggtaattactccgtttgatgtacctttctctgcaatcgacacgccaatcatcggttcgttatcttccgatgaaatgatatgcccagttacctgatacccaccctgtgcaaaaagcaacagggggatatttgtcagagtaaagagtacaaacaagagaattgattttctcatctttgatacttaaaattaaaattaatgaaattgatttatttttatagattcatctactaatgaaatacgtatatggtatctttacgtataaaataatacctcctctcccacagaccaattttaaagcataacttttcattgaccttgggcagaaatacttttttctaaaaatagaatgggaaaaaactaacttggctgatttttaatattacgccaaatatccgaatagatttttcgtgttactgttgtgtgaatcgaatgtatgtccatctgctctcttaaattataaattcaaaaccaatattacttgttccgttcaggtgctaagaacttccaattacgttctatttggctacaaatataaatattatagttaaacaaaagaaacaaaaagtcgcaaattttataccaaatttccacttatatctttttaacactaaacaaagcctacatagaatacaaaaggcacaaaaaaccaagcttatcgtaaagggtacacccattagctttcattttgacaagcatattaattgtctaaacaacagtattatagtacataccaaggacctcattgagaggattcaccatagaaaagataaatattcaaaactattttcctatttttgcactcattatatataaaaaggtataagatgaactacggattcgtgaaagtagcagcagccgtgccacacgtgaaagtggccgactgtaaattcaatgtagagagaatagaaagcctgattgcagtagccgaaggaaagggagtgcaaatcatcattttcccggaaatgagtattaccggatatacttgcggcgatttgttcggtcaacagcttttgctggaagaagcagaaatgggattaatgcaaattctgaataatacgcgccaattggacattatttctattgttggtatgccggtagttgtcaactcgacggttattaacagcgcagtagttatccagaaaggaaaagtactaggcgttaccgccaaaacttatctccctaactataaagagttctatgagcaacgttggttcacctccgcgattcaactaacaacagacaatgtacgcctatgcggacaaattgctcccataggagctaatttgctttttgaaacttcagatactactttcggaattgaaatttgtgaagatctatggtccacgattcctcccagctcatcgctagctttacaaggggcggaaatcctattcaatatgtcggcagacaatgaaggtatcggaaaacacaattatctgtgttctctcatcagtcaacagtctgcacgctgtatcgcaggatatgtcttttcatcttgcggtttcggagagtctactactgatgtagtctttgccgggaatggattgatttacgaaaatggaagtctgcttgcacgcagtgagcgattcagcatggaagaacagcttattatcagcgagattgatgtagaacgtatacgcgcagaacgtagaatcaacacaactttcgcggctaatcaagctaatttaagagacaagagagcagtctctgttgccacagaatttgtaaacagtaaagaactaaccctcacccgaagtttccatccacatccatttgtaccacaagggaaagaactaaacgaacactgtgaagacattttcgctattcaggtagcgggattggcacaacggcttgtccacacaggagccaagactgccgtagtaggaatttccggtggattggattcaacgcttgcactacttgtctgcgtgaaaacgtttgataaactaggattatccagaaaaggaattcttggaatcacaatgcccggtttcggaacgactgaccgcacctaccataatgctatcaacctgatgaaatcattaggaatatctattcgtgaaattagtattaaagacgcttgtattcaacatttcaaggatatagaccatgatataaatgtgcatgatgtcacttacgaaaattcacaggcacgcgaacgtacacaaatcttaatggacgtggccaatcaaacctggggaatggtaataggtacaggagatttatcagaacttgctttaggatgggcaacatataatggcgatcacatgtctatgtatggcgttaacgcaagcgtccccaaaacactcgtaaaatatctggtacagtgggtggcagaaaatggtgtggacgaagattcaaaaaccacattgcttgatatagtggatactcctatcagtccggaactgattccggcagacgaaaacggagaaatcaaacaaaagacggaagacctagtcggtccttacgaactacacgacttcttcctttattatttcctacgtttcggtttccgcccttcaaagatttattatctggcaaacatcgcattcaaaggtaattataatgaagagacaatcaagaaatggctggctatctttttccgccgcttcttcaatcaacaattcaaacgttcctgcttgcctgatggtcctaaagtaggcagtatttctatcagtccgagaggggattggcgaatgccgagcgatgcaaattcagccatgtggcttaaagaaatagaagctttataggcatcctattaataggcttgtgccaccccattggcacaactgtgccaacggcatggcatagttgtgccaatgcgatggcacggttgtgacagcgcggtagtacaaacagggtactagtacgatcctccaacagtcatcacttctctttttattcgttcaatatcagcttccctgattcttctaataatgtttttataaatacgatgaaagccaaagcctccgtcagtcatttcacgaattgcatcttctttggagatattctggaatataatacggtaaagagcacacacggctcctgtgcggtcagagccatgatgacaatgaatgacaatgggcgatttacgattctttatgatgcgcaatgcagttatcagctgttcctcatctaccgagtgcgctttcatctttactcgatgaagtttcacagtcgttcctgtcgcctcatcattgtcactatgtctattacgaagattaagagactccccaataccatatttttcgagagctttaaagtccgagtgtgaaggttgttcggaacgatatacacctgaatctatcttatataaattattcagtttactatcgggaagagtaatcttctctgctttcaggttttgactaaaaagagaaatagaaaagattactccccaaagtaggcttaacaggattcgtttctgcataagtctgtgtatttaagaaatcagagtacccctttgctggaaggaagttcaaaatgatagatatctctcttgattgccattttcaaggcacgtgcaagggctttaaaaattccctctatcttatgatgctcattctgcccttctgctttgacattcagattcatttttgcagcgtcgctcaatgacttgaaaaaatgaagaaacatttctgttggcatctctcctattttctcgcgcttaaactcagcatcccatactaaccaagggcgaccaccgaagtccagacaaacttgacaaagacaatcatccataggcagtgcatagccatagcgctcaatcccacgcttactacctaaagcctgattaatacactcccctaaagcaatagcagtatcttcgatagtatgatgttcgtctacctccaaatctccttttacacgaatcgttaaatccataccggagtgttttccgatctgttcaagcatgtgatcgaaaaagccaagtccggtggaaatatcgcaaatgccgcttccatcaaggttcaaggcaacataaatatccgtttctttcgttgtacgacgaacctctgcttttcgttcaccggcaaaaaggaactcggctatctgatcccagtctgttgttgcaagtgcacaaacattctccagtcctttttctttcaagctttctgttgagtcctgcaaataaatggcacgacatcccaaattcttagcaagttccacgtcagtgggacggtcaccaatcacaaaacttccggcaagatcgtagtcaggattatcaatatactttgtcagcattccggtacgcggtttacgggtcggtgcattatcctcgggaaaactacggtcaatcaaaatatcatcaaacgcaatcccctctcctgccaatgttttcaacatcaaattatgagcaggccaaaatgtttcttccgggaaagatgaagtgcccagtccatcctgattagtaaccattacaaactcgaaatcgagtttactgcggacaaagcccagattacggaatactttcgggtaaaattctagtttttccaacgaatcgagctgataatcaacaggcggttcaatgaccaatgtaccatctctatctataaataatactttcttcttcgtgtccattatccttcatattttctaagagcagccaataacgtattgttctctatccgggtgcccactgttacacgcaaacagttacagcaaagtgaaaccgaatggcgattgcgcacgatgataccttcacctacaagataattatatattttcaccgcatccgtcactttaaccagaaaaaagttcgcatcagacgggaacagtttgatggtgcaaggtaatttctcaaattcttcttccagataatcacgttcttccttcaacgttttaacccaacgttctatttcataatgtttatgcaacatagaaatagcttgttgctgagtcagttgattgacattatagggatatttgattttgctcaggataccgattatttctactgacgcaaatgccattcccaaacgaatggcagcacatccccatgctttggagaatgtctggaatacaacaagattcgggtacttatccaattcttccagaaaagaaggtgcatcggagaaatcactatatgcctcatccagtattaccaatccttcaaactcgcgaaggagtgtttctatttcagaccgaatcaaatcgtttcctgtcggattattcggtgaacaaaggaaaatcagcttggtatgttcatcggcagctgccaataatttatttgccgaaaactgaaagttatcatccaacagcactttccggtattccacatcgttcacatcggcacacacctgatacattccgtaagtagggtcgatagcgaccacattatctttacccggctcgcagaatgcacgaaataccaaatcaatagcctcatcactgccatttcccagaaaaatatgttcgggagacactttctttattttcgacagcagtgttttcagttcacactgcatagggtccggataacggttatgaggtgtattgtacggattctcgtttgcatccaaaaagacagaagccgtataacctttatattcatcacgagccgaagagtaaggtttcaacttccaaatgttcgggcgggttagttcttgtaacgttttcatcagcaatactcttttagttttcagttattacttattaattgctttaaggcggatagtgacggcattcttatgtgcgtccaaatgttcattggcggccatttcttcgatagccggaccgatggtctttatcccttccggaaggatttcctggaatgtaatcttacggataaagctatccagacttacaccgctatatgctttcgcgtatccattagtcggcaaggtatgattggtgccggaagcataatcgcccgcactttcaggagtcaaaacacctaggaagacagaaccggcattagtgacccgttcggctacttccatatagttttccgtttccacaatcaagtgttcgggagcataagcattcgtgagttccaatgcttcatcgatatttctaaccagaattagtttactgttttccaacgatctggaggcaatttcacgacgaggcaattcagctaattgacgttctacttcagccataacttccgtttgcagtttctcggaagttgtaatcaacatagcctggctatccactccatgctctgcctgagacaataaatccgcagctacaaaagccggatttgccgatgcatcagccaaaacctctacttccgatggccccgcaggcatatcaatagctacatcacgcaagctgaccaattgtttggcagctgtcacatattggtttccgggaccgaagatcttatatactttaggtacgctttctgttccataggccatagcagcgatagcttgcacaccacctgctttgaaaatcttgctcactcccgccagttgagcagcaaaaagaatagccgggtgaatatttccttctttatcaggaggagtacaaagtacgatctctttgcatcctgcaatttttgcgggaacagccaacatcaatacggttgagaaaagcggggcagttccccccgggatataaagcccgactttctcaatccccactgctttctgccaacaggttacaccgttcatcgtttctaccttctttccgacaaagcgttgagctgagtgaaatgtttcgatattctgtttagccaaagagatagcggctttcaatttatcactcactaatgtttcggctacccgtatttcttcaggagtaacagcaagtgaggacaaggttactttatcaaaggttgcttcatattcgagtacagctttatcaccttctgcccttaccttgtctataatggaacgaactgtgtcaaacagactttccgtattcagtgccggacgtttcaagagttccgtccactgatcttttgtagggtatttaattactttcattcttcagcatagattatttatttccacgtattttacacgatcatcttttcaatcggcaataccagaataccttctgcgcccaaagctttcaactttccgataatctcccaaaaacgtttctcgtccaatactgtatgaaccgaacaccagccttcctgcgctaatggcatgacagtaggacttttcatacccggcaagacggcaataatttcttccagtttatccttcggagcattcatcaatacgtatttcttatcttctgctgttttcaccgcattcatgcggaacagtaattcattcaacacttctttcttctcatcgctcatgttcttgttaccaatcagtagagcttcagatttcatgaccacctccacttctttcaaacggttgctgaccaaagtagagccggaacttacaatatcaaaaatagcatcagccagtccaatgcccggagatacctctacggaaccggtaataacgtgaatttctgcattcacgcccttttccttcaggaaattacgaagaataacaggataagaagtggcaattttctttccattaaaccatgataatcccggatattccaaatctttcggcatagctagtgacaaacggcatttgctgaatcccaagcgtttaatgatttcagcatcttcttctttttccataaattcattttcaccgacaacacccaaatcggctacaccggtagctactgtttgtggaatatcatcatcacgaaggaataatacttcaataggaaaattggaagactgcaccaacaaggtacgtttagtagtactcaacttgatatccgactcttctaaaagtgccattgtctcttcaaaaagacgtcctttggcctgtactgcaattcttaacatgatcttatttaattatttattattaattactattcgaattaagggaataaaaaaaggcttaccgtattcggcaagcctttgttatcgttatatagagtatacacaatatcatctatgcccaccgagttattcgttaggaaaatgatgatgatgatgtgtagctgtatatttcatacttcttttattaactgcgacaaaagtaaagcatttgtttcatacttccaaacatttatcacaaaaacttgaatttttatttcaaattaaaggtagtatttcttccggctctacatcacagtgcaaaaaatgcatttcgcttttcgccttttcctgtgagaaagtaaagtaggtacaaactgcctccgtacatacttcattatccttattatatagcttagcttcgatgataacaatgtttctttttatttccttgatagcagcccgcagtacaacgtgagaatctttcgtatcgacagacttccggtaacgagtttccattttagaagttactcccgttgtctgcaatttacgcaacacaacccaagcacaaatttcatctaataaaacagcttgaataccgccgtgcaaagtgtcaatccaaccctgatattcaggacgcggtttccagatactcacgatttcgtcaccgtcttcataaaattccattcttactccggcttcgttattgggagcacaaccaaaacaattgtatccttccaaacctttccaaggatttattatcttcttcataattctctccattatttagttttacttcccaaatataggcaaaatatgaaaaagacgaatcatttccatagatttactttcggatacaacggatagaaaaagcctttctttcaacagctgatgtggccgtttccatagtatttgcattgcttttcaaaaaaaagacagattcagccatttccgtatttgtatcatccagtgtccaatatcctaaaaacttgccttctaaaacacttagatccggataagaatacattcctacaggaagtccgttaaaacctgaatcattgttaacgggcaacacttctgccccgtctatagatacccattcacccgatttcaataaagaaacatcccctttcaggtaagaatttaagatattccagtcctcccaatttggaatattccaatggagtggcaagaaatcaggagataatgctacactagcggtataaaggtaattatttgtacaggatagcaaatacccgacagcattttcagtaacttcattcaatttcggaatttcatcaccattcgcaaacaaagctgcttccagattattccgcatccaatactgtgttccgattttcaccaacggataattatgaattactcctccacgtacatcacgagccacatcatctaatgctaatacctgtaacacatcatctgcctctgttattgacaaagtaacttttccgtttgccaatacataaatattattataaacaggcaaagtcccggcaatataagtcaacgaatgctcatctatattccacgacactttaccaccatgcaccttaccagcttgccctagaagttgaactaccactccttgagataaatcagcagtagcatcattcttcatcggataagcaactattgcctgagaagaaaagtccggagtcaccagatattccttacatatttcagccacctgttttcctgcgttcaagactttatatacattcgattttgcaaacgtcaatttcgacacatctatatatttatgaagattttccgattcggcatgatcagtttcatcacctttccaatcgctaatttctccactaactttgttcatcaaaatatcctcagcagctacaaaagttatttccagctctctttgtttgccttcctgcaaattcagagttgaaggtaacaagctaatatactgtttgccttcaacttccagcgccacatactgatatccggccataacttcttgcggtatcaagataagttctttccctatcaacttcttttcagcctctatctgccatactccggccgggataataacattttcttccgaataatcggaataagactgtttctgaaaatcatatattgcttttgtataaaagccactaaccgaaaggtggggatcagctgccaataaatcttccacattgccaccttcacccggcacaatcgctatcttcagacgaaaaaacttatgattataagtcaaaggaatggcatctatgcttgcagaaacaccgtctcggatagcaaccaaaaaatcagaacgagaataatcagcagcaacctcttgatttgtttctactgataccgacatcgtgctctctcctatcgccactccctcttgccgataaggataatagctcactaaattaagggtcactccgtcatccggataatataccaactcatccgacagaaactcgcctccggaagaacgaacaaaatgaagattatctacatagcgttcctcctgcatcgtagtggaacccgcaagtgcgaataaaccgactccttctccttcttcaaaactattaccgacaatacgagtattagtcaattcatgtatgtcagttacaaacttcaatggaatatttccatcagcaattatcgcttcattttcttccgaaatgtggttcacacaagcagtcagcaagatagagaaaatagcaaaagaacctatgttcttgggtaaataatgaaatactttcatcttattttttattaatttcccattagaaatctctgatagaacagaaagaatgacataagagaaagtattagcttgcggttatgagatactatacaacacgtctgttgcaactgtagaatcttgattccagcacttcattttgaaatgcaagggacgaaagtatacattataattcagatagagaatatttttatttggaaagctttatatttttatttaaatactaaataatcaataacttacaaaaaactgatatatatcagagatttcctacttcaccttattatattagcaatctgatgattctcaaaaagaataaccgacctctacccctgcaatatgcttacctcgcgaagattcatattgataacaataaaaagcatcaagagaccagcgcttagttaaatcaatctctattccgggacgataccttaaacgagctgtccgccaaaaaggtgcatcatccaaactttgataaatttcaatagagaaataaggtgaaacaattcctttttggggagcatatcccaacttcagccgggaacgtaaacgagtttctgattctccacgatcaaaagtctgctgaaacctttcccgcaaagacattttgagccattgataacgaaaactggccgtagctccaatacgataacggtgtctgaacttccaccctatttcacctaagttccgataatgcgtttcataaccaatctcaaatttcaaaaacgaaaaggcacggtaatcacctccgacagaaattccccaacggtcaatcgcactcatatcatcttccgttctcaattccaaatcaccggaaacagcaaagcgggagtcaatcttatgatttactttgaatttagtccaggttgtgaaatcattatcttgtgcgatcatggcagaagttgtaccaacaaccaacaacacaaacaataaaactctaataattataaatttgctactcattgattttcgggttaaagttgcaaagataacaaattatcctcggcaaagaaaaaccatgatactgaaataatcctgaaatagcattagaatgttcttttcaaatataccatgtccgtcaacagtttgccttcttcataaatcggatggtcgtaattgtcggtaaagaaattctctacacggtgggaaatggtaaaaccgcaatgttcgtagaaagatatggtagaagacacatctcctgtaccaaccaacatttcagtacacttatcctgataatgctcgaatagaaattcaattaaacgtttcccgtatccctgacgttgaaaaaaaggaacagtagcaatattcttgatttcataaatgccttccccttcacgggttactacacaggctgctttcaatccgttgtcatacagaacgaacatatcgccacgttccaaataccggtctaccatactttcttgttcatcagccaagagtaacaattcgaggaattctttcttatctgaaattactttctttatctccatgtttttaaatattgaatagcccttctcgcaaagatataaaaatatcacagtgcaaacaaaaacaccatataaataagtatatctttgtaatatgaaaaatcaaaagcagaaacaaccttgtactatgtgaaaaataccattaaataagagcaccgaaaaattacggaatggaattttttacgatgcataatgacagatgaggagtttacaaatattaagtatgagtgtatagggaatattcatacaaccgcctattattaatcattttttctatgttccaaaatcgtattcatattctccaaggcccaccctactaatccttcaatatgaggaatcagagtccctcccgtatccgtcaagttatactctacacgaggaggtacttccgcatacactttccgctccaccaatccatcggattcgagtgtacgaagagtgaccgtcaacattctctgagaaacatctcctattgtcttatgaatgtcgctaaaacgcatagtaccattggcattcaaagtgataagcaccagcatcgaccacttatctcccaagcggctgagcacatctctaactggacaatttcctgtcgggtgaaagtttttcatcttttaacgttttgtatttaactgaattacaacaatagttacttccatgtaacttccttattcagaggtgcgttcttgcttttctcaacaaaggaagatacatttgcatcacaaaagtaataaacttactaataataactattgtttcatttaaataattatgattatggcaaagaaagtagcagttttagcagtaaatccggtaaatggttgtggattattccaatacctggaagcattttttgaaaatggcatttcatataaagtatttgccgtatcggatacgaaggagattaaaacaaattcaggaatcagtctgacaacagatgatgtgattgctaatttgaaaggacatgaggatgagtttgacgcatttgttttctcatgcggagacgctgtacctgtatttcagcagaatgcagacaaaccttataatatagatctaatggaagttatcaaaactttcggagataagggcaaaataatgatcggacattgtgccggtgcaatgatgtttgacttcacagggataacgaaaggtaagaaagtggctgttcatccgttagccaaaccggctatccaaaacggaatagctaccgatgaaaaatcagagattgacggtaacttctttactgcacaggatgaaaatactatttggacaatgttaccacaagttattgaagcactgaaataaagccaaatgacaggaatatataacaataaatgtaaacaaacaaattaactcaacgcagtctgtttatagagaagcgcgttcctttaaaagaaacaatgcatttctcggtgtgcaacaggtcgttccttttaaaggaatgacctgttgatttaaaaagcaaaaacgcctcatatacgatactataaatcaataagatagaattttccgtgaccgatacaggaatgggcattgctcctgataaagttaaccaagtgttcgaccgttttgtaaagctgaataccttctcgaaaggcacaggcttagagttgtctatttgcagaagtatcatcgaacatcttggcggtactatcggagtgattaccctataagcagacagaagccatagaaaaagctcctcaaaaagaaaatcaaagtattacaatcgcaaaagataaactaataattctaattgcagaagacaatgaaagtaattacaaactgttcgagtcgatactaaaatatgattaccacttaatacatgcctgggacggacaagaagccgtaaatatgttcaaggaatatggtccgcaaattgtattaatggatatcatgcagaaacgcattatcttattgtaaaagcgaggcttaataattcagccacaccttgaaagccgctatcttgtctttgctgactatgattttatctttaaatggtggcaggacgtgtacaaccgccttacctaaaaaatagggttcgatacgctgaatggcatctaccgaaacaagtgtctggcgattggttcgaaagaagacatcaggattcaattgttcgcagagtttatccaaagcaaagtccaaaacatattctctattattcttggtaactacaaaagtgagcttgttctccgaatagaaataggcaacatcacttaccgccaaagtaaaaagtttattaccggaagaaataagaaatcgggtgcgatattttttattctctaccaccggaagcttctgcgtatcagacaaactttccaacacctccagtatccggctctcccgattaaaatcacggatatatttctctgtgagactctcgaaacgttcgatagtctgcaataaacgttcctgatgaatcggtttcagcaaatagtcaatgctattcaccgcaaaagcacggacagcgtactcgtcataagcggtggtaaaaacaatcatactatccggccgagcttgttcaatcaacataaatgaattgccgtccgtcaactgaatatccaaaaataaaagttccggatgaggattcacacgaaaccattcaacggattcttcgatagtaccgggcagaatcatcacctcccaatccgggcgaagcgactgtatcatctcatgtagcaaacgtgccgccggcacttcatcttctattattgcagcttttatcttattcatgaaagcaagggaatttttacggtaaatttatcagattcattttctatcacaatatcctgattacaaaggagcttataacgggcggaaagatttttcagccccattcccgaaacgactccgcatttttttggccgaatcggattacagattatcagagtcggaggttcttctacattacacagctcgataaccattggtttccccgaatggatcacattatgcttgattacattttcgaccaatagctgaagcgtcaaaggcggcatcttcatctctttccactcatccggcacattgttgtggacataaatgcaatcacccaaacgaacttgatgaagaaaaatatatgaatcaagaaaaccaagctcatcctgcaacgtcaccaatcgctgattctgacactggagagtataacgatatacgtcggaaagatgttgtgtgaagagttctgcatttttaggattatatctgatttctgaaatcaacgtattcaaactattaaacagaaaatgggggtttagctggttttgaagagctgtatagcgtgctatgttattttcttcctgcaaagcagccgcctgtttctgcaatttgagggtatgctgcatagaacggttggcaagcagcaaacctaaaatcaccagttccaccaaccaaactaatatcaagatacgccacccgccattaggaaaaacaaaaggatgtgaagcaccgaccaagaatttggcagttaccaacaatccataattgagcagaaaaaacatcaacatcaccattgtataaataaaaatcagtttccaacgacgatgaatattcaccgaatactgattatctacccatgtagtcagccgaatagtagaatatccgagcaaattgaacgcaagaataaaaaacagaaacattcctaccgaatataacgcatccgatactctatcggaaagttccgcatagttggctagcaggaaaaaagagaaaacgcctagccctgaaaacagcgcactatatgatatacggttcaattttatattcatacgattcttttcacacaaagttactgctttttagcgataatcataactatggagcgcttttattaattccgaataatgtccttgtgcagcagcttttgcctgtacatagttcacctgcgaagtctgccgataggtttgcgcatcaatcacttccaccaccgaaacttttccttcattgtagcgttctactgcttttgcctcattttcttctgctttagccagcgaactttcactcaaacgaacacgttcaatagcctgtgacaatgccttacgcgctacactcacttctaattccacccggtctacgactttatttagattatcttccgccattccgatacggaaggaagaaacacgcttctcgcttctccgttttccccattcaaaaataggaacggacactttagcataaacagcgtagtttgggtctaaatctttcttgaaattgtatccgggagatgaatagctaccttctactcccacatagaattgaggtttgaattgcgaatcattcagtttttttgtgctctcagcaatacgaattttgtcataagccatttgtatttccggacgtcccatcccggtagataaccacagagaatcgctgacaactactatcggtatctgcgcatccaactccgtaggctgttccagccggacaccaatcattgagtttaatgccattctgcctgtttcaaaattactttgcgcctgaagtaattgatattccgcttcatttaacttcacttctgccattaacaggtcctgtgggtcaacgagtcctacttctaccctttcttttattgttttaaccaaggctgctatcgaattgcgaaagtcttcggcgacatcaacaatttcctgccgagcaacggcactccaatactgaatatccgtttggtaacaaacagcatcattcagtgctttcgcctgattaccggccaaggcctgctgatgttgcgccatacggatggactccagtacacgccctcccgtataaaccggttgtaaaatagacagagaacctccatagtttaaattctttccttccactgttttcgacaaccctatggaaggaatatccaaagttagttccataggatttccggtgtattgaaaactggcagcaccggaaagtttcggtttcaaatcggcacgtgcagatttctctacttccatactggcagcgatattcttttccgctgctttcaaatcgtgattatagtccaatgccatagtccgatatttctccagcaatgtgctttgttgtgcaagaaccggcaaagacaaaaagacgaaagtacaaaacaacaggctaaatattccttttctcatcttcattttccttttactttataaaacatggaatataaggcgggggtgacaaaaagcgttaatcccgtagcaaatgtcaatccgaaaattatagtaacagccattcccccgaaagcaacatcaaacaacaatggcaccataccgaaaatcgttgttgtagcagccattaatacaggacgggttcgggaaacagtagcctcaacaatggatgtatataaatcaattccactccgatgttgaacatttatctcatcaatcagcacaattacatttttgattatcatcccaagcaaacctaaccagccggctatcggaaagaatccaaaatcaaaccctgtcagcaacataccaacagcaattcctatcaaagacaaaggcagaatgcaaagaatgataaccggctcgcggaaattgccgaacaaggccaccaaaatgactatcaatgcaagaaatgccaacggaaaatatttcgcaatagcctgcatcgcctccccttgatctttatattgagaatcccaaaagaaggtgtatccttccggtaagtggattttctctatttctttccgtatttctccatgtacctcggacatggtgtagcccggtttcaccccacacatggcagccattgaaagttgccggttatatgtccgtacctgaggaaattcccaacttctttctattcgttccgtgacctgcgaaagcggagccgatctttctccattccaaattgagaaatctcccaatgcattgacatcagtaatatccacatcacctgatttcaacaaaacgggtacctttttctcatcatcccggtagataccaacaggcagaccgtcattgattgatttcactgattgcatcatcgaagccttggtgatacctaatgcacccgccttcacaggatcataaaccgggcgaattaccaacgacatatttccccattcattacgtgcatccgctactttgggatttcgtcgcatcacttcaatagcttgtcccaccaatgaatcaagtacagcagggtccgggccaagaaaacgggcttcaatgacggcctccgtcaaaggactcaattcaaacttattcactttaatcagaggttcgggatatttcagcgaaatcgaatcttgtaaccgggtatgcaactgacgggaaagttctgacgttttacattttaccaatatttgtgcataattggactgaggtccaaaagatacattagacaagtaataacgtggcggagttcttcctatataagtagatactatttccgtttcctcctgcccacggatatattccgacatttccattacctgacggtccgtttcttctatttttgtcccttcgggtaaccatacatccaatgtgaagtactgtttatccaacgccggtataaacaccttgggaataaacttgaaactccaagccgctagcaacatcatcacaaccatgcatcctattgttgcataccgatgacaaatcacccacctcaatgctgtacgaaacttatcataatatttacctgcaaaaagagcatcctttagttcgtcgggtcttggccgacgaacaaactcctgaatgaagaaaggagtctgcgtcagcgcaaagacccaactgaacatcagcgaaacgccgataactacaactaaggatgacaacaactcaccggttatatgcggtgaataatatataggtaaaaaagttaaaattgcgataattgttgccgctaataacggtaatgcagttgaggaacaagctcgcattatggccactcgcttgcgcatcccccgttgcatattgactaatgccgaatcggatactacaatggcattatccaccagcattcccattgcaataataattgcagccagtgacatacgctgcaaagctatcccttgagccaacatcacaatcagcgttgcaaaaatggaaaagaccagaccactacctatcaggataccatttttgaatccgataaaaaacaacagaatggcaactaccgtcacaacggaaattatcaaattccagataaaaccttgatttgccacagccgactcgtaaccttggtcgtaaattgtctgtaactcaaagccttcgggcattgtctccgaaaattgctcaattttaccttttacagcttccgccatatttacgacattcccagtcggtacggtagatatggcaatacccaccgcgggactcccattaatccgcattttattgctcggaggcgtctgataactttccttaatctctgcaatatccgccaatcgaaaatgctctcccgtacgtgatacgatagtcagattccggatatcatccaaagaataaaaatttccggtagattcaatccgtattctgtttacacccgcatcaatacctcctgcatctactactctgttttgggcctcgaaagcacgggaaatatccgaaggagtaataccgcttcgcgccatgacggaaggggtgagaataacatcaatcgtcggaggttgtacaccataaatttcgaccttggctacgtcctttactttcaacagttcgtttttaatgagttttgcctgttcttccagttcccgatacgaatatccttcaccagtcagcccataaaagacacccaacacatcgccaaagtcatcgtttactacggacggacctgcgtcagccggtagcttagattgtacatcattaaccttccgacggagtttatcccacagttgctgcatttcatccgcacgaatttccttcttcacataaaccgttatcttggaaagtcctgcccggttttctgttttaagataatacaattcacctaaagactgtatggattcttccagcacatcagtcacttgtgattgtacctcggaaggagaagcacccggatatggagttaataccaatgcctgttttatagtgaacggagcatcttccaactttcccattttgacataggaaagtagtcctcctcctaagactaatagtaagagcagaatagtcaccgaccttttctgcaagaaatatttcacaaacttcatactttcaaatttacttttgagcagtgaccggcattccttgtttctgagccatgatttctacagatgttccttctgaaaggaaacgcaatttactgacagctaccgtttctccagcctgtaatccacctttcacttccactttcccattcggaagtaattcacctaaaacaatctttcttttcgagacttttccggcagcattatctaccgtccagacataatctccttcagtaggacgatgattgagagctgtttgcggtatggttatcatggatgtcgttgaaggagaaggaagatcaagcaaaacctttccggaaacgcccgccggccattcaccctgtttattgggtaataatgccgtcatcaggaaagacaggttattccgggtagtacttttggaaatttctaccactttcgccggatatacaacatcagaacctatatcaaagcgcacacttacttctttgatttctccggcctgaagtgcaatatcctgtgtgacataagcttctatctttaattgagtaatatcaataaaggagatgacaggttgagtcgctttcacatcctgatatttctcgatatacacttccccgacatatccgtcaaaaggtgcaatcaactgcgtatcatgtaactcatttgtcgctgtctcaaaagcagtcttagcagaagtataatccgcacgtgctttttcataagcgctggcagataaattatttttctcatacaacactcttatccgttcaaattccgcttttgcctgattatagatagcctctgcacgttctttacggatacggaaatcacgagagtctatttcagcaatgatatccccacgctgataatagttaccggcatatacctcaaaacggtcaataggaccgcctacccgaaaagatagttccgtctccttgaatggtttcgaaataaacgaaaactcacgttccgaggaaggaaccgacatttctacttctgccacttttatccgtattgattcatcagttctcttttctcctgttccgcacgacgcaaacaggcagataaaaagcatacacattgaataattagtcgttgtcattctattctacattagttatattatcaacggtacgaaaatagaggaaacaaagaaaagcgcccaactttaaatttccgaaaccgaaaaaggaaaggctcaaacggaaaaagaaaagatgaaaatctgagccttttatactacttatgtgtttccttactatctttgcagctcaaacaaatattactaatctcatttatgaccgaagaaaaaatacataacgaccgttccggtagctggtgggcattaagtccgttgttcgtgttcctctgcctctatctggtaacttccattctcgtcaacgacttctacaaggtacctatcactgtcgcttttcttgtttcttcctgctacgcgattgctatcacgcgcggcttgaaactggaccagcggatttaccaattctccgtaggagctgccaataagaatatcctcctgatgatatggatattcattctcgccggtgcctttgcgcaaagtgccaaacaaatgggtgctattgatgccaccgtcaacctgactctgcatattcttcccgacaatctgctgttagcaggaatatttatagccgcctgcttcatctccctatccataggaaccagtgtaggaacaatcgttgccctcactcctgttgccgtaggactagccgaaaagacagagattgctctcccattcatggtggcagttgttgtcggagggtcttttttcggagataatttatcgtttatctccgacactacaatcgcctcaacaaaaactcaggaatgtgtgatgcgtgataagttcagggtaaattccctgattgtcgtcccggcagctattatcgtgctgggtatttatattttccagggattgtccatcactgctcccacccaagtacagactatcgaatggataaaagttataccttatatagtagtattgggaacagccgttgccggaatgaacgttatgctcgtattaatcataggtatcctgacaagtggtattatcggtattactaccggaagtattgatgtgttcgactggttcggagctatgggaacaggcattacgggcatgggcgaactgataatcattactttactggccggaggaatgcttgaaacaatccgctacaatggtggtattgactttattatccggaaactaaccctccacgtcaacggaaagcggggagcggaactaagtattgccgctttagtaagtatcgccaacttatgtaccgccaacaacacaatagccatcattacaacaggaccgatagccaaagacattgcgcagaaattccaccttgaccggcgaaagactgcaagtatcctcgacactttctcctgtctgatacagggaattatcccatacggggcacaaatgctgattgctgccggattagccaatatctctcctatcagtatcatcggcaatctttattatccgtttacaatgggagcttgcgccctgctcgctatcttattccgttatccgaaacggtattcataaagaaaaagaacagaaatatttgtcaatcaaaagaaaagccgtatctttgcgcccgctattacgagttagtagcataattcaaatcattaattaaaaacaattattaaaaatggcaactagaatcagattgcagagacacggacgtaaaagttacgcgttctattcaattgtaattgcagacagcagagcaccacgtgatggtaaatttattgagaagattggtacttacaaccctaacaccaatcctgctacagtagatttgaatttcgacgctgcattggcttgggtactgaaaggtgcacaaccaagtgacactgtacgtaacatcctttctcgcgaaggtgtatacatgaagaaacatcttcttggcggtgtagcaaaaggtgcatttggagaagcagaagcagaagctaaattcgaagcttggaaaagcaacaaacagtcaggtctggctactttgaaagctaaacaagacgaagctaagaaagctgaagccaaagcacgcctggaagcagaaaagaaaatcaacgaagtgaaagcaaaagcactcgctgaaaagaaagctgctgaagctgctgaaaaagctgccgctgaagcacctgcagaagaaactgctgctccggcagaagaagctcctgcaacagaagctgctgctgaataaattcggcagattccgaacaagaaacaaggaaaagctataaatcctctccggttcgccggaggggatttttttgtttcaacacgagagaaactgaggttttatacagagacctgataatctacaaatagcagattctatgttacgtcatgtgaaattatcctctttatgctataaaacatagtaaattatttctcctatttagaataaaattcctttctttgcatcagcatagttcagcacagttatcaataataaataaggatgagacgaactgataagaaagcaacattcggccaacactcgagcaaagtcacacaattggcagacacgctcagccaggcaatctccatgaaagaatttcgtgagggagattccttgccttctatcaatcagttaagtgcacaatatggagtatcacgggatactgtttttaaagcctttctggatttacgcgaacggggtctgatagactctacaccgggaaaaggatactatgtgaccagtcaggtaaccaatatcctattattacttgacgaatatactcctttcaaagaggccttatacaatagtttcataaaacatttgcctatcaactataaagtagacttgttattccaccaatacaatgaacggcttttcaatactatcatccgtgaatccataggaaagtataaaaaatatatagtgatgaacttcgataacgaaaagttcagcacagctctgaataaaatcaatccttccaggttattactccttgatttcggaaaatttgagaaagataaatactcgtatatctgtcaggatttcgatgattcattctatctagcattatttacactaaaagaaagaatgcagaaatatcttcaaatcgttttcctgttttctaaaggtttgaaacaccctcagagtagtaaggagtatttcacacgtttctgtgaaaaagaaggcttcttgcatgaaatacaggaagatatcgagaacctgacggtccgcaaagggactgtatacattgctatcaaacagcaagatgtagtaaaggtagtaaaacaaggaagattggcaggactgaaatgcggaaaagatttcggtctgttagcatataatgatattccttcatacgaggtcatcgacgaaggaattacttcattaagtattgactgggaaatggtgggaaatgaagcggcaaacttcgtactcaacaatgtcccgatacaaaagtacatgcctactgaagtgcgacttcgaaagtcactctgattttttttgccgcacaatcagcacagctcagcacagatgttatttactaaataaaaaaaattaagaaaccatgaaaaagtatccgaaaatcgggattcgtcccactatcgacggtcgccagggtggcgttcgtgaaagccttgaagaaaagacaatgaacttggctaaagcagtagccgaattaattagcagtaatctgaaaaacggtgacggaagccctgtggaatgcgtgattgccgatagcactatcggccgtgttgctgaaagcgcagcctgtgctgaaaagttcgaaagagaaggtgtaggttctactattaccgtaacttcttgctggtgctacggtgcggaaactatggatatgaaccctcattacccgaaagctgtatggggattcaatggaacagagcgtccgggagcagtatatcttgcagcagtattggcaggacacgcacaaaaaggacttcctgcattcggcatttatggacatgacgtacaggatttggacgataacagcattcccgaagatgtagcggaaaaaattcttcgttttgcacgcgccgcacaggcagtagctacaatgagaggaaaatcttacctgtcaatgggtagcgtatctatgggaattgccggttctatcgttaatcctgatttcttccaggaatacctgggaatgcgtaatgagtctgtcgacctgacagaaatcatccgccgcatggaagaaggtatctatgaccacgaagaatatgaaaaagcaatggcatggacagaaaagcattgcaaagtaaacgaaggcgatgacttcaaaaatcgtcccgaaaaacgtaaaaaccgcgaagagaaagataaagactgggaatttatcgtgaagatgatgattatcatgcgcgacctgatgaccggtaatcctaaactgaaagaaatgggcttcaaagaagaagcattaggccacaatgctattgcagccggtttccaaggacaacgccaatggactgacttctatcctaatggcgactatcccgaagctctgctgaatacttccttcgactggaacggtatccgcgaagcattcgtggtagctaccgagaacgatgcctgcaacggtgtggcaatgctgttcggacacttactgaccaaccgtgctcaaatattctctgatgtacgtacttactggagccccgaagctgtgaaacgtgtaactggcaaagaactgacagggctggctgccaacggtattatccaccttatcaactccggagcaacaacgctagacggttcgggacaatcattggatgcagaaggaaatccggtaatgaaagaaccttggaacctgactgacacagatgtagaaaactgccttaaagcaacgacctggtatccggcagaccgtgattacttccgtggcggcggtttttcatctaatttcttgtcaaaaggtggtatgcctgtaactatgatgcgtctgaacctaattaaaggcctcggtcccgttcttcaaattgcagaaggttggactgtcgagatcgacccggaaatccaccaaaaactgaatatgcgtacagatcctacatggcctactacttggtttgttccccgtttatgcgacaaaccggctttcaaggatgtgtattctgtaatgaataactggggagctaaccatggagcaatcagctacggtcacattggtcaagacctgattactcttgcttcgatgcttcgaattccggtatgcatgcacaatgtagaagaagacgaaatgttccgcccggctgcatggaatgccttcggtatggataaagaaggagcagactatagagcttgtgcaacctacggtcctatctacaaataattttcaggcacggattacgctgttgctttcatatttctaaaagccgtgtaatccgtgcctgcaatgacaatcccctgcaaggaaaccttaccgggggagtatgtccctaaatacccatttttctaacctattttgagttactattattataaataatttatctttgcaatcatgataactaacgaacatatcgaacagttcattgaacaagcacatcgctacggtgatgcaaaacttatgctttgcagtagcggaaacctttcctggcggattggtgaagaagtattaatttccggtacaggttcttgggttcctacccttggcaaggaaaaagtctctatctgcaatatagcaagcggaacaccgactaatggtgtaaaaccttctatggaaagtactttccatttgggtattctccgcgaacgcccggatgtaaatgtggtacttcacttccagtcggagtatgccacggctatctcctgcatgaaaaacaagccgactaattttaatgtaacagcagaaattccctgccatgtaggttcagaaataccagtgattccatattatcgtcccggctcacccgaactggccaaagcagtagttgaagccatgttggaacacaactccgtcttattgaccaaccacggacaagttgtctgcggaaaagactttaatcaagtgtacgaacgagctaccttcttcgaaatggcttgccgtattattgttcagtccggaggcgattattcagtattgacaccggcagaaatagaagatttggaaatctatgtattaggaaagaaaacaaaatagtatccgtacataccataccatgaaagacaacattaaaaacacatacttagcagcagactttggaggaggcagcggacgaattatcgccggctcccttctccatggaaagctggaactggaagaagttcaccgcttctccaaccgtcaggtaaaattaggaaatcatgtctactgggattttcctgccctattcgaagacatgaaaaccggactgaagctggctgcccaaaaaggatataccgtcaagggaattggtatcgacacgtggggcgtagatttcggattgattgataaaaatggaaatttgctaagtaaccctatctgttaccgggatgcaagaacagacggaatgccggcaaaggtattcaaggttctggatgaacagcaacactatactactaccggaatacaggtcatggctatcaacacgctattccaactttatagtatgaaacagaaccgggatccccaattagagattgcccaccaacttctgttcatgcccgaccttttcagttacttcctgaccggaatagccaataatgaatattgcatcgcttccacttcggaattacttgacgcaaaacgacgaaactggtcacaagaaacaattcgtgcattagaacttcccgagcatctgtttggtgaaattatccaaccgggaactatcagaggtactttaaaagaggatattgcacgggaaaccggactgggtgcagtagatgtaatagccgtaggttctcatgacacagccagtgccgttgcagccgttccggcgacaaaaactcctatcgcttttctaagttccggtacgtggtcgcttttgggcgttgaagtcaatgaaccgatattgacagaagaagcacggaaagccgaattcaccaatgaaggaggtgttggaggtcgcatccgcttcctgcaaaatatcacaggactatggattctacaacgcttgatgagtgaatggaaagcacgtggagaagaacaacattatgatacaatcataccacaagctgccgaagtggaaactgatacaatcatccctgttgacgctccggaattcatgaatccggaaaatatggagactgctcttatgaattattgccgggatcactctctgcacatacctcaaagcaaagcggaaaccgttaaatgtgtactccaatcattagcattcaaataccaacaggcagtagaaaagcttaaccattgtctcccctccccgatccgccaattaaacatcattggaggaggttcgcagaataaattactcaaccagcttacagccgatgcactcaatatccctgtttacgccggtcctgtcgaggctactgccataggtaatattctgacacaggcaatggctaagggagaaatttccgacctccgggaattaagagagattgtaagccgaagtgtcacacctcaagtatattatcctaaaaaataaaaagtatatggaaacacctaaaaccggttatcaggtccaatcttacagcgtcccagtcaaaagatattgtcagactcttgacttacgcgattctccggaattgattgccgaatatcgtaaaagacatagtcaagcggaggcatggcctgaaatccttgcaggtatccgggaagtaggcatcctcgaaatggaaatctatattcttggcacacgcttgtttatgattgtcgaaactcccgttgacttcgactgggacacagcaatggcacgcctgaatactcttccccgccaacaggaatgggaggaatacatggctatcttccaacaagccgctcccggaatgagttccgcggaaaaatggaaaccaatggagagaatgttccatttatataatacctaaaaatatcccaaaagaaccatgaaacacatcaaacagtccatcctgtcaaaagatggcatcaattatcttatcccttttattctcatcacttcttgttttgcgttatggggatttgcaaacgatatcaccaacccaatggtaaaggcattctccaaaatcttcaggatgagtgctaccgacggagcgttagtacaagtcgctttttatggaggctactttgccatggcttttccggctgccatgttcatccgcaaatattcttataaagcaggtgttctgctaggtcttggtctgtatgcttttggagcattcctattcttccctgctaaaatgacaggagaatattacccgtttctgatagcttactttatcttgacttgcggactctcatttctggagacaagctgtaatccatacattctttctatgggaacagaagatactgccacaagacgtttgaatcttgcccaatctttcaacccaatgggttcattgctcggaatgtatgtagccatgcaattcattcaagccaaattacatccaatgggtactgaagaacgtgctttactcaatgagagtgaatttcaggcaatcaaagagagcgatcttgcagtgctaatcgccccttatctcatcatcggtctgattatcgtagctatgcttctcttgatacgattcgtaaaaatgccaaagaacggagatcagaaccataaaatagacttcttcccgacattaaaacgtattttcacccaaacacgttatcgcgaaggtgtgattgctcagtttttttatgtaggtgcacaaatcatgtgctggacttttataatccaatatggtacccgcctgtttatgtcaccggaattcggcatggacgaaaagagtgcggaagtgctttcgcagcaatacaatatcatagcaatgattattttctgtatcagccgtttcatttgtactttcattctgcgttatctgaatgcaggaaaattattaatgattctggctattttcggaggaattttcaccttaggtactatcttccttcaaaatatttatggactctattgcctggtagccgtatccgcctgcatgtctctaatgttccccactatttacggtattgccttaaaaggtcttggagatgacgcaaaattcggagcagccggacttattatggctattctcggaggttctattcttcctccattgcaagcaagcattattgatatgaaagaaatcggttggttgccggcagtcaacgtttcattcattctaccttttatctgtttccttgtgattatcggttacggctatcgtacagtgaaaagaaactggtagaaaacatacttgacaatagtgaggctacctcaaaaagaatgaactgcccccaatagttttgtgtctaactattgggggcagttcacttacacattcacctaccacctcccccctacggggactcctccttcccgaaggaggagaatggaggatactatcgactataagctagcaaatcattattttactaattcaccttaccaacaaatttgaagaagaacctttaagaaggagattatctctccttcttgtaattttccaatccagtttgcagaaactcgatatacttgggaatatcttcatcataagcatacgacttgttcaacggttttccctgattatccagcaatacgtagaaaggctgtgcattggcaccgaacttcacacgttgcagataactccatttgtcaccgacagtacgcaaggtacgttctgttccgttctcgacaatcttcacaggttcggtcagcggagttttattatctacatagagagttatcaatacataatcgttattaattaagtcgctcaccttcgggtcagtccaaacagcagcctccattttacgacaattgacacaaccgtatccggtaaagtcgagcattacaggcttaccattcaaacgtgcatactccattcctaaatcataatcgtcaaatttggcatgtacttcattcttatacaaattgaaatcctgcgtctgcataggcggagcaaacgcactgacagctttcaacggtgctccccatagaccaggaaccatatataccgcaaatgccaaagaaacaagtgccatgaagaagcgggtaacacctaccttattatcatcatcatcatgcgggaacttgatcttacccaacagataaaatccaagtaaagcaaaaataacaatccataaagcaaggaaagtttcacgatcaagcagtctccagccataagccaaatcggcaaccgataagaatttaagtgcaaatgcaagttcaaggaaacccagtgttaccttgatcacattcatccaacctcccgatttcggcatagatttcagccacgatggaaataaagcgaaaagagtaaacggcaacgccaaagcaatggcgaatcccagcattccaattgccggagctactatacttcccgttgtggaaacctgcaccaacaaaaatccgataatcggacctgtacaagagaaagacaccaacgaaagtgtaaatgccattaggaaaatactcagtaatcccgtagtcgattccgctttactatctaccgcattactccacttcgaaggcaatgtaatctcaaatgctccgaagaacgaagcggcaaaaactaccaacatcaggaagaagagaatattgaaaattgcattagtagataaggcattcaacgcactggcaccgaagatcaatgttatagccaagcctaatgccacataaatcacaacaatagacgcaccataagtccacgcatcacgaatccctttcttcttgtccttactacgcttcaggaagaagctgaccgtcataggaataatcggccatacacacggagtaaacaaagctaatagtccgcctaagaaacctgtcacaaaaatataaatccaggacatatctccctgcgtatgttcttcacctaacgcttgcagttcactaatgaccggtttccagagttcaccggatgcaacggcaggttgaatccccgtagatgcatctgttgtagtggcaggaaccagttccatcatagctacagtatccttagaaacaacaggagccgcctcttcttttttctcaacttcctttttttccggttgttccgctttagctgcagcagcattagctgtcttcgctactccggaaaacttaaacggcacttcagtaggaggaagacaactttcatcgtcacaagctccatactccagataaccttctatttcataagctccacctgtgagcttcaccttctgaatgaatttagccgtattctcaaaataacgcaccttcatttcaaacaacttgtcgaaagtggcgacctctttgccaaccggtttcagctttcccagtagctctatgccagacgttttatcaacattaaacgttgcagaaataggtccgccgtctccaagttcggtagaatacacatgccaccctttatcaatggcagcggtaaatacaatctccgcttctgtgtcagaaagagtattgaactcagtcttgaactttaccggatctttgatctgcgcttgcaaaacacatacaacaaagcttaaaagcagtgaagaaattaactttttcattttcaataattaggggattataattcataatctacacacgcacggctttcctttgtctcagccaaaatccttccggctgccacatggtcgggatgcgtcgcatagtatttcacatcttccagcgtatcaaattcactatacagcgctatgttccacgtttctccgggattcatattcaatccgacttcgaccttacggatcaccgcaattttagccggaagcgcttctattgcctccttaaatttattcatgactacaagtttctcctctgctgaaacttcgtcttttaacttaaataatacaatgtgttttaccattacgttgttattttaatgaattgtttctatatttgcctggtcaatgcactgcataaacaatgcaaatttactctatttggtttaaatatacacttaaagagatgttaattataggaatagcaggcggaacaggctccggaaaaaccaccgtcgtacgaaaaattgtagaaagccttcctgcaggggaggtagtattgttaccccaggattcatactacaaagacagtagtcacgtcccggtggaagaacgccagaacattaacttcgatcatccggatgcctttgagtggagtttgctctccaaacatgtcatgatgctgaaagaaggaaaaagcatcgaacaaccaacctattcctatctgacttgtacccgccagcccgaaacaattcatattgaacctcgcgaagtagttatcattgaagggattcttgctttatgcgataagaaactacgcaacataatggatctcaaaatatttgtagatgccgatccggatgaacgcctgatacgtgttattcaaagagacgttatcgaacggggacgtacggcagaagctgtaatggaacgttacacacgcgttctcaagcccatgcacctgcaatttatcgaaccttgcaagcgctatgccgatcttatcgtacccgaaggcggaagcaataaagtagccattgatatactgacaatgtacatcaagaagcacttaaggggttgagaatggtaagttgaaaatgaaaagtaaaacgtcaaatatgaatgccaaaaacctgattatccctctactccttgtgttgttctgctgcatgttaggttgccgaaataaacaacataacaaggtgaatgaaaatgtacgcgatctttcgcagataaaagatagcggagaattggttgtattgacgctttacagttcaacttcatatttcaactatcgtggacaggaaatgggttttcaatatgaacttagtgagcaattcgccaaaagtatgggattgaagctcaggattgaagttgccaacagtgtggatgaattaatccgcaagttattggctggcgaaggagatatgattgcctacaacctgcctatcacaaaagaatggaaagacagtatcctctattgcggggaagatatcattactcatcaagtgattgtgcaacagggaaaaagcaagtctctgaaagatgtaaccgagctggtaggaaaagacatatatgttaagccggggaaatattacgaccggcttgtcaatctgaataatgaactgggaggaggtattcatatccacgaagttaccagtgacagtattactgtggaagacctgatcacgcaagtagcacaaggtaaaattccctatacggtagccgacaatgacttagcgaaactgaacaagacctactatcctaatctgaatatcgatttgtccgtcagtttcgaccaacgttcttcatgggctgtacgaaaagacagtcccgaactggcagccgcagctacaaaatggcatcaggagaacatgacttctccggcttatacagcaagtatgaaacgttattttgaaaacagtaaaatgatgccccactctcctatcctttcattaaaagaaggaaaaatatcccattatgacgatttgttcagaaaatactccaaagaaatcggctgggattggcgtatgcttgcatcattagcttatacggaatccaattttgacacaacagctgtttcatgggcaggagccaaaggcttaatgcaactaatgcctgccaccgcccgggctatgggagtacctccgggaaaggaacagaatccggaagaaagcgtaaaggcagctatcaagtatattgccgctaccgaccgcagtttcagtatgattcccgataaagaagaacgcctcaattttatcctcgcttcttacaatgccggtttaggacatatctatgatgccatggcattggcagagaaatacggaaagaacaaactggtgtggaaagataatgtagaaaatttcatcctgcttaaaagcaatgaagaatacttcactgatcctgtctgtaaaaacgggtatttccgtggtatagaaacttataacttcgttcgtgacattgtgtcacggtacgaatcttataagaagaaaattaaagcctaatactttttgtaagtcaacagactgattccgacaatagccaggactgataaaggtaatgcaaacaatatcgggtcaatcaccgggaacggatatgtttctatcagtacatcccgtccgaacaacgccttgcagatacccaatgcagccgattctttctgatgtagaaataccagagcaaaaagacttccaagagttcctacccaaagactcgctattaccccttgtttcgtcgcccgcttccaataaagcgcacagaaataggcagggaggaaagctgccgcacagattcccataaaaatagaagttccacgggcaataatatcatggggcaacatatagcaaataatatagctgaccaagatagagaataacactcccaaacgaatcacattcgtgagtttgccacgggagcgaggcttatacgtaccataaatatccgagccgaccgacgcacccattgtatgaaactgtgaactcaacgtcgacatacttgccgaaaggatgcacagcataaatagtgcggcaaaccaatcgggcattgccttattaataaaatatggaataatcttatcaatatcctgtacgacttccgtagcaatcgccccttctgttttcagaaagaaaagattactcaatgctccggcatgataaatagcacctacggttataatcaaaaagaaacaaccgataaacacaccacggttcaactgcttgctactttccaccgtcatgaaacggactactagctgcggttgcgccagacatccgattccaacacccagaataagagaagtaaccaacgaataccattgtggagaacccgtgacaggcatcgcagtccacccctgatgtcccaatgccttaaacttttccggaaccagaggagcaatagcagtcagttccttattagcctccgtaaagttcatatcaagcacctgatacaaagagaaaagcaggaacaacatacaagcaaacataatgactgcctgcaaagcgtccgtatacatcactcccttcattcctccggcaatcacataagcggcaatcaccagcgtgaagatcaataaagagatattgaagtctatctgaaagatctgttcgataaatacggctccgcccttcatcacaactgcggcataaagcggcatccctataaaaatcacagcagcaataaagacttggatattacgtgagcgaaaatgacgtcctaacaattgcgggaaagtactgacattcagtttagcccccatacgccgggtgcgcaaaccaaaaaagataaaagcaataacaaccccgataaacatattgaggaaacagagccactggatacccataccaaaagcggcagccactcccccgaagcccacaatagcagatgcggaaataaacgtggcaccataagaaagtgccataacgataggattcatctgacgcccgcctaccagatagtcactggtactcgttgtctttttataccctaaaaaaccaagataagcaagtgatagcagatagcctatcacaatcaaactgagtgtaaatgtattcatcgtgtttcgtctttttcgtcgtccttattccagtatttcagcccgaaccaggcagcaaaaatcacacatactaccgaaagcaggtagggcagaattataaaagggtcgtctattccaaacatttgcgtatcagattttaattaattcagacgcaaatgtaaggaaattattgaaaagacaaaacttttgtttactaatactgattataatgtatctttttctcgtcaaatttctgtttcggattctctttggtagcgggataaccgaacggaatgacacaaagcggaaggatattctcaggcagaccagtatatttacgcaccacctgcatacggtcttcataaggataagcggctgtccacacagcaccaagtcccagactttcggcagccaaaaggatgttttgggcagcagcagagcagtccagataccaataggaagatttcacggaatcaccgcaaacaataattacattacgagcctgcgtcaacatcttggcatacggaagtgcggcagccattgaatccagtttggcacggtcggacacaacgacaaattcccacggacggacgtctttacccgaaggggcagccattccggcacgaagcaacaaatcaatcttctctttctccactcccttattcagataagtgcgtacgcttttacgctcaaagatattatccaatgcagcatttccggttccggacgttcctttttcttcttttgcagaagaacatgaactcattgcaactattgccatgaagaggcataagaaagagaaaatctttttcattgtgacactgttttaaaataggtttaacttatttttctgtgcttcttccagtgaaacggtttcacggcgcagtaatccgctcttttcacgaagtgcctcatattccgcctccagttcatttaccaattcagcctttaattgcggattcaataaacgggaagcgacacttgcattctgggaagcatctttaaggtgcaccaccggagcgtgatagaccggagctattttcagcgccgtgtgcatcttagacgtagtagctccaccaatcagaagaggtatatccagtccggctttctccagttcgatagctacatgggccatttcctccagagacggagtaatcagaccactaagacctatcatgtctactttttcctcaatagcgcgctgaacgatagtctctgcgggaaccattactcccaagtcgacaatctcatagccattacaagccattaccacggcaacaatattcttaccgatatcgtgtacatcacctttcactgtggcaagcaatacctttccggcagaagtcgttccttctactttttccgactcgataatcggttgcagaatagcaacagccttcttcattgtacgggcagtcttcaccacttgaggcaggaacatctttcctgcaccgaaaagctcgcctacataattcattccgtccatcaacggaccttcaatcacattgactgctttatcatagagtggcaatgcttctgccaagtcttgttcgagataatctccgatacctttcatcaaagcatatttcagacgttcctgaacggattcatccctccatgcatcatgcttcacagcctgttgtccggcagcttcgccagaagttgcctttaaagcttccgccagttcaatcaggcgttcggcagcgtcggggcgacgattcaagacaacatcctctatcttttcaagaatatctaccggtatatcactataaagtacagaagttcccggattcacaatccccatatccattccttgctgtatggcatggtaaaggaacacagcgtgcatggcttcacggatataattgttaccacggaaagagaaagaaaggttacttactcccccgctgacatgcgctccgggaaggtttttcttaatccaaccggtagcttcgatgaagtccaccgcatagttgttatgctcttcgatacccgtagctacggcaagcacattcggatcgaaaataatatcgtgagggttaaaacctatttcatcaaccaaaagacgataagcacgctcgcaaacttctattttacgcgcagcagtgtcagcctgtcctttttcatcaaaagccattactacggccgcagctccgtattgcttgataatccgggcgtgttcaaggaatttgtcttcgccttctttcagagaaatagagttaacgatcgatttcccctgaaggcattttaatccggcttcgataacttcccatttagaggaatcgatcatcacaggtacacgtgcaatctccggctcggacatgataagattgaggaacgttgtcatctctgccttagcgtccagcaatccatcatccatattgacgtcaatcaccaaagctccgtcttctacctgttgacgggcaatagacaacgcttcatcatatttcttttcatttatcagacgaaggaatttacgcgaaccggccacattacagcgttctccgacatttacaaagtttatttccggtttcacttccaacagctcaaggccggaaagccacatacaatcaggtttaggagccggtatatgcggtcgggcaccttctaccagagccggatattcggcaatatacgcatccgttgttccacaacaaccaccgataatattgattaatccttcctggatatattctttcacctcatgggccatatccgcaggagtttgatcatacttgccgagactgttcggcaaacccgcattcggataagcacttatataataaggtgcgcggacagccaactgttcaaggaaaggctttaactgtcgggccccgaacgagcagttcaaaccgacagaaaagatattggcgtgttgcacagaagcaagaaatgcatccagcgtctgaccggacaatgttcttccgcctacatcagacacggtaacagataacatgaccggcacctcaacacctgttactttcattgcttgttctgcagcaaaaatagcggtcttggcattcaacgtatcaaatattgtctcaatcagaatggcatccactccaccttcaagcatagcttccatttgctgttggtaagctgccgccagttcatcataagtcaaggcacgataagccgggttgttcacatccggactcatagagcaggtcttattggtaggtccaacggaaccggctacaaaacgcggtttatcaggattctttgcagtatattcatcagccagttcacgcgccagttttacagctgcaagatttatttcacgcacatattcttccacgtgataatctgccatagaaaccgtagtcgaactgaatgtattggtttcaataatatccgcacctgcttccagatacttacgatgaatatcttgaattacatcgggacgtgtcagacacaataaatcattatttcctttcaactgtccgggaatatgcgcaaaacgctcgccacgaaaatcttcttctgtgagattatattgttggatcattgtacccattgccccgtccaaaataagaatgcggtcggatacaatctgagaaattgtctttttcattaccctatcatcatcttttaaacatacgagccatatctctacggtcgtctttttcttttatggattcccgcttatcatactccttcttacctttcgccaaagcaacgaccagtttcgccaaacctttttcgttgataaaaagacgcacgggcacaattgtaaacccgggattcttcatttcccgttgaagtttctccagttctttcctactaagcaacagcttcctgtccctgcgtgccgtatgattattgtacgatccgtaaaagtactcggcgatatgcatattctttacccataattcgcctttcacaaaatagcaaaacgtatctaccagactcgcttttcccaaacgaatggatttgatttccgtaccggtcaatacgatacctgccgtataggtatctatcagttcatagtcgaacgtagcacgtttattcttaatatttacaggaggttgtttcattttcacttattaattaagtatggccgtcaacttattaaacacaaattgaatcaccgtcggacatagtattaacaaaacggacgataaaagggtgtatttcaaccgttgtttttcttctaccttcatcattataggagcaccttcccatactacatagacaatgtagaactgcaacagccaagcaataattctaaaatcaggtaatagtccggtgacaatctgaagcagaaacggtacaacaagtgcatatcctgcaaattgttgcactaacggcatattagcatgcatgccaaacatcttgattcccatttcatttatggcataagctgccagaaagtatcctccgaacagggccacagctacggcacaacaattggtcatagctatctgaaaactttgcggaccgccccaaccattggtcaatagtgacccgataaagacggacaagccgcataaaccaatcataggatagacaaaagccataaaaacttttcgcctatcctcttccatagaaatttcctcccaggccttggccggagaggaaatcaatttcattgctatgttaaatagttccttgtagttcaatgttattctctaaaagtataagtcacaggagttgtagttgttgtcttggggacatcattattgcttgaattcgcttctgatacaatcgtaatattacttggatatcttccttcatttgcattcttataagcctctatagcacttcttatatcaaagactctatacgaaaaagctctataagtttctttagccttttcttctgtagaagtatgacgtaaaaacagttttaaatctgttttacctttaagctcgttttcatcactataatataccataaaaaaagtatgactggctattttctcaaaagcaaaatattgaataggaacaagcaagttatagttatcaatcatagccggcttcaaatcggtaatacttatgacacctctatctgaaacataagaaggatgctctccttcatcttctgcttttgtcgtactatgtacagcattacccgagattttttcagtagatccgattgttgcattgatagtgtttgttgtataatctatatccacctctgtatcatagctacacgttgcaacaataaaatcacctggcataaagttagttgtaccttcaaccgtattctttgatttaaaagtaaatccatccaatgaagtgaaagttaaccccaaaaagctatcttttactttacctagaacaggaaggtcatttacctgtgtattatcatccccattcatacaagaagtaaccgacattcccattactacagccatcaaagccaccaagaaaaatttcatttgtttcataaacatattttttagattttgcaaagatataaattctaattcacaattgataaatgcagatacttaaaaaatactgcatcccttactttattattttcgcaaaaagttccaaatgttcgtctacatagcttgcaatcaaagcagtaacctgttcttccatttccaaataaacctcttccagctcatcaaaagcctcgtattgctcatacatagccataaattcgtcatcagtccgctccttctccaagtccttacgattggcatcaaatatttttttggccttatagatcaatttcgagaattcatccgccccccacaaacgcatcaccttcgcaaacggattatcaaaaatatatcctccgtatccattctggatcaattgacagaatccgccaaccataatttcatcacggaaaatctggtaagccaacaaagaatgctgctcacctgtcagtaatggcatcgtatcagcagtcaattcaccaccaatcacttccttatatttatcggtaaacacttggataaattcatccattccttcgcccgcagccttttgtaaagcagattctataacttcaatcataattctttcttaataaattatgcagcaaagctacgaattttattctacatctcaataactcatactacaaataaggatgcaaatcattatcttctacacaaggaaaaaatgcaattttctctttcacctatcaccgcagagcgtcaaagtggttattcatcgtggtttcacatacggtgacaggttaattgcaacctatcaccaacctatcaacctatcaccgtttttccccttgattaataccctaaagaagcaggtatacttcttctatccccctttcatagttcatatttagcgctgatattgttaggtcaccacggccgtgaagagaagttaccacagctgtggcaggatatctccacgtccatgacaagatcttaccacggccgtggtgacctaacaataccggcatccttttcctattttagctactacttttgagtactttccctatgggatatactattattctctatttgtccggagactaattctatggatgtaagcgcattcccatatacacacctattaaataaggtataagccaaatacaccaaacgacaatgctgaaacggttaaaatgctttttagcttttgccgaacctttcacataagtccatatcgcccacaaagcatgcacaaacattaaaagaatggcaatagtccccgtcaccgtatgaatctcatcatgcaggtgagtcagttcggcgatatgttccattaaactggtaccaaccgtatcagctatcaatccgatcaaaaagaaagctatatgccagaacttcagcttcttttggagtcgctcgccccaaacaccgatcgaataaaaaacgagtgcagaggaaatgacacaaattgccgcaattaaataatgtatatctatttggtccagttccatacttttttgtttttcaataacaacaaagatatgaatagatagttctacaaccttcaaactttcacaaatgcaatcccgactttacaaacgacggagaaaggcaaaccgatttgtctcttttcacaaaaaagtaataaaaggcgatttgcagaaacaaataaatcgactacctttgtgggcgatttagagaatcgtgactacgtatttttaattatatcacttaaaaaaagagctaattatgacttattcacacgaagtggaacacatgtgtgttgtaaagaagggtcctaaccacggaccggctcccatacccgaagaaggcaaatgggtaaaatcaaaagaaatcgttgatatttcaggtttgacacacggtatcggttggtgtgctcctcaacagggtgcttgcaaactgacactgaacgttaaagaaggcgttatccaggaagctttggtggagactatcggatgttccggtatgactcactctgctgctatggctgccgaaattcttccgggaaaaacgatcctcgaagcattgaacactgaccttgtttgcgacgcaatcaacactgctatgcgcgaactcttcctgcaaatcgtttacggacgtactcagtctgctttctctgaaggtggtttgatcatcggtgcaggtctggaagatttaggtaaaggtctgcgtagccaggtaggtactctttatggtactttggctaagggtccccgttaccttgaaatggctgaaggttacatcaaaaacatcttcttggataagaatgacgaaatctgtggatacgaattcgttcacatgggtaagttcatggatgaaatcaagaagggaacagatgcaaacgaagcattgaagaaagttacaggtacttacggacgtgtaacagcagaacagggagcagttaaacatattgatccacgtcacgaataatataaggaggaaagaaactatgattagagaagtaaaattcgaaagccaagaccgtcgtatcaaaggtatcatcgaagccttgaacgctaacggcatcaaagacatcgaagaagctaacgctatctgcgaagctgccggacttgatccttataaaacgtgtgaagaaactcagcctatctgttttgaaaacgcaaaatgggcttatgtggtaggtactgcaatcgctcttaagaagaactgcacaaacgctgctgaagctgcagaagctatcggtatcggtttgcaggcattctgtattccgggttctgttgctgacgaccgtaaggttggtatcggccacggtaacctcgctgctatgttgctgcgcgaagaaactaaatgtttcgctttccttgcaggtcacgaatctttcgctgctgctgaaggtgctatcaaaatcgctgcaaaagcagacaaagtacgtaaagaaccgttgcgttgcatcctgaacggtcttggaaaagacgctgctcagatcatctctcgtatcaacggctttacttacgttcagactcaattcgattactttaccggtgaactgaaagttgttcgcgaaatcgcttactctgacggtcctcgtgcaaaagtaaaatgctacggtgctgacgacgttcgtgaaggtgtagctatcatgtggaaagaaggcgtagacgtttctatcacaggtaactctactaacccgactcgtttccaacatccggttgcaggtacttacaagaaagaacgtgttcttgccggtaaaccctatttctcagtagcttcaggtggtggtacaggtcgtactcttcacccggacaacatggctgccggtcctgcttcatatggtatgacggacactatgggtcgtatgcactcagatgctcagttcgctggttcttcatcagttcctgctcacgtagaaatgatgggattcctgggaattggtaacaacccgatggtaggttgtacagtagcttgtgctgtagacgtagctcaggctttgagcaagtaattataacaattacaacatattaaatccctgtaactgataaggttatggggatttttattctctataccagaagaaaaagcaaagcaagaaggttcttcttcaaatttagtggtaatttacaagtcggtggtatctcgattctcctccttcgggaaggaggagtacccgtagggggaggtggtaggtaaatgcacaagcataatatatgcacagataggcacacctaccaccccgacttttagccacccctccttattcatataattatgagtttatgcaaatattgccaatctatttgaatccgacaataacaacattccatccttattgatcatttacaggagtttagggcgaaggtagaagtaaaagcctatggtaactataacaaaatttgttataatcactaaattagttatctttaccgtacaaacccatttgggaaataaaaaaatattaccattaaattctaataagaggatattggaattttgatacggttgatctaatcgtgaactcacataaaactatatttacgatatgaataaactctatttaattgcaatcggagcattgctttccggtattattacggtccaggctcaagaatggaagccgcaacaatggcctgtattaaagaaatatgacaaggaacatctttaccaaattgcgttacctttaggaggtatcggaactggtacagtatcgctcggagggcgtggagaactacgcgactgggaaataatgaatgtcccggcaaagaaatacagcacagtaaccacagggaacaatgctcctttctttgcaatctatgccaaaccgcaaaaccagaaagcgactaccacattgctggcaggaccattatattcgcatgaatatttacattatgaaggacgtcctgtcaatcatcatggtcttccgcgttttgaacaagcttcattcgaggcggcataccctttcggacaagtttctttatcggacagcaatctgcctgtaaaagtcaaggtaaagggttttaacccgtttattcctggcgatgccgatgccagcggattgcctgtggccgtactctcgtatgaagttacaaacactaccgaccaaccgatgaatgtatcaatctgtggttcgatacgcaactttataggtaaggacggaagtaaattccgtacagactggaaaggtgattacattcctacaggagcaaagaacaacaagaacaagtatgttgaaagcaacaatataaaaggaatatacctttattcggatggtgtagataaggatgattcggcatggggaactgttgcgcttaccactcaggcagttaatggcgtgacttaccgtacttcgtcaaaagccgataactggaacaatagcattctcaacttttgggatgattttagtgcggatggtatgctgaccgaacgaagtaagcaggaagatgaagatcctatggcctcattgtctgtaaataagacaatagctccacaaagtactgaaacatttacattttatatcacatggagtttcccgaacaggaaagcttggtcttctgttgtagtaggcaactattatagcaatcaatatcctgatgcttggaaagcagcggaaactatcatcccacaaatacccggattagaaaataagacattgtcgttcattaatgcactgctcggcacttcttatccggaggtggtgaaagaagcggctttgttcaatctagccacattgcgctctcaaacagtatttcgtttgccaagcggtcatatgatgggatgggaaggtgtgatggaccgtttcggttcgtgtgaaggttcttgtacccatgtatggaactacgaaactgccactccttatcttttcggggaactggcaaaaaccatgcgtgacgtagagttcaactatgccacaaaggaaaacggtttgatgaatttcagggcatctctcccactttctgaagcaagcaaagggaacaatccggttgcagacgggcaaatgggatgtataatgaaaatatatcgcgaatggcaactctccggagataatgattttctgaaaaataactgggaacaggtgaagaaagtcctttcatacgcttggatagaaaaaggctgggatggtaatcaggatggagtaatggaaggttcgcaacataataccatggatgtaaactactttggacctaatcctcaaatgggcttttggtatatgggagctttaaaggctgccgaaaagatgtcaatagcaatgaaagataaaagctttgcgaagaaatgccgtacactgtttgagaagggaagcgaatggatggacgaaaatctgttcaacggagagtactatgaacataagattacagatccgaagacatttgaatttcttgacatgaacgaccctgatgttaagattccgggattccagttaggacaaggttgtcttgtcgaccagcttgttggacaatatatggctcacttgtgcggattaggttatctgggtgataagaagaatatacaaacaactatgaagagtatcatgaaatataacttcgtggaagacttcagccgtcattttaacaatatgcgttcttacgtaatgggcgatgaagcaggtttacttatggcttcttggccgaaaggacgtctggaagttccattcccatacttttccgaagtcatgacaggatttgaatattgtgctgccgttggaatgctttatgaaggcatggaagaagatgctcttacttgtatcaatgccatccgacgccgtcatgatggtgcaaaacgtaatcctttcagtgaatcggaatgcggacaccattacgctcgctccatggcaagctggtctgctatcatagctttgagcgagttccaatattcgggtgttgataaaagcatgaagataacagaccgtccaggcaactatttctggagcaacggctattcatggggtacggttcaagtaacagaagatgatgttaccatagaagtgattaatggcaccctctcgttgaagtcgcttacggtaggtagccggaaaggtatgaaactgaagcattttgattttaaagaaggagatgtccgaaacatcaaacttcataaataattattattaaacatgggtacacggagatacggatttgttccggtaaggaacttttatatccgtatctccgcgttttaatatttaatttagtataaaaatgaaaagctaatattattatcttacctgtttgtccactttattccaagtggctgtttaccaagagagagagaaagcaatctgaagggttgctttcttgtttctaagcaactcccaacagttctacctcaaacaccaatgttgagtaagcaggaatagaatcaactgatttattgccgtatcccattgtataagggatataaattatccatttatccccaacgtgcattttctgaagcgccacctgccagccttctattacgtcactgagacgtaaagcatcgggacaactgcgttcataagaattatcaaactcccgaccgtcaatcagacttcctttgtaatgcacggtaacaatgctccgcgcacccggagaaaccgtaccttcaccggtctccagtattttataatagatgccacacggcaatgcaaaaacaccttcctgaaaagacaggtttttcagaaatcgccgattggcttctttatattctttcttctttcccataaactatcttattagagttcacaaaaataagtagaattgagaagaatctatcataaaaacagtatatttgtttgttgaattataaaacctcttcgctatgggacaaatgaaaactaaatgtagcagtagtgctaccggactattctttctgcttttgatgatcgtgagtttttcatcatgcacacgcacgcaaaaagacatcattccttctgccgaatatgctccgtatgtaaatgcctatacgggaggagttatttcacagaactctaccatacgtattgaactgacacacgagcaaccaatggtagacttaaataatgagttaaaggaaaatccatttagtttttcaccttcactgaaagggaaggcatattgggtgagtaataataccattgaatttgtacccgaagaaggtacactgaagccggggtcactttatgagtgtacgttccaacttggcaaattcgtcgaagtggacaagaaattaaaggagttcaacttctccttccgggtacaggaacgcaatttcacactttccatagaaccactacctatcacagatgcccaaccggatgaaataaatatcaagggggaaatatgtttcagcgacatcgtaaaaaaggaagaggtggaaaagatattgaccgtcaaggacgggaataacaaaagctatccggtagaaattataccaacagataatcttacccgataccaattctgtatcaaccaggttccaagagatacggaggattaccaactgaccatcactgccaatggcagtcccgcacgtatcgatcaaactcaaagtgaagaggttctgattccagcgaaagatagtttccgctttctgtccgccacacgcatcgacgaaccggaaaatggaattgaggttgtgttctccacccctttatccgatacacaggacctgaaagggttgattgagattccggagctttcttcttccgttttccagatcaaagaaaacagggtattcatctacttcgaagcaaaccagctaagcaaattgacgctcaacatccatgaaggagtaaaaagcagtcagggcaaaacgttgggaacttcacattcgatctcattcagcgaaataaatctgaaaccgcaggtagagatgttgacaaccgccgctatcctgcccgattcaaaaagcctgattatcccattccgggctgtaaacctgtatgctgtggacttaagcgtgattcgtatctttgaaaataatgtgctgatgtttatgcaaaccaattcgctagcttctgctaatgaattacgccgttcgggacggttggtatacaagaaaacattatggctgggcaaagatacctcaaaagatattcataactgggaaaactattcgatagaccttgccggattgattcgtcaggaaccgggagccatttaccgggtgatactctctttccgccaggaatactccgcttatccatgcggcggagtcgacaatcaggatattaagttcgctgacaataatacgccggacggtttgatgaaagtaagcggaagtgccttgtccgaagcggatgaagcggtttgggatacgcccgaagcctattattactataacggcggaacaatggactggagtgtataccgatggaaagaacgggataatccctgtcacccttcctattatatgaattcggatcgggctgccgcctgcaacatttttgcctctaacctgggaatgatcgtgaaacgtaattctctgaataaactatggattgccgtaagtaacatattggatacaaatccggtaggaaaagcacaggtaacggtttacaacttccaattgcaacccataggaaaaggggaaacgaatggagagggttttgttgaaatcagttcaaaaggaacacccttcatcgttgtggcagaagcggagaaacaaaaggcttatgttcgcgtggtagacggtgaagaacagtctgtcagccggttcgatgtaggaggaaaagagattcagaaaggactgaaaggatttatctatggtgaaagaggcgtatggcgaccgggagatacactacacatctccttcatattggaagaccgggaaaagaggataccggacaaacatcccgtagcactcgaaatctataatccgaaagggcagttctataccaaaatgatttctacacaaggtatgaacggattctacacgtttgatgttcctacgcaagccggtgacccgaccggtctttggaatgcatatataaaggtaggaggaactactttccacaaaggcctgcgtattgaaacgataaagcccaaccgactgaaaatcaatctgacgctaccgaagattcttcaatcaacagacaaaaatgtcactgttccgctcgcttctgcgtggctgacgggagccactgcctccaaattgaaagctaaagtggaaatgtctttgtccaaagtaaacacgcaattcaagaactacggacaatatatattcaacgatcctgctacggatttcacaaccattaaaacggatgtgttcgatggcatacttaatgcggaaggaaaagcaggagtcacgttgaaagttccggcagcaacaaatgcaccgggtatgctgaatgcgaccttcaccacccgggtattcgaaccgggaggagacgccagcatctatacacaaagcattccgttctccccatttgtatcttacgtaggaatcaatctgaatcaaccgaaaggaaaatatatcgaaacggataaagaccacgtctttgatatcgtgaccgttaattcgcaaggacagccggtgaaccgttccaacctggaatataagatataccgcatcagttggagctggtggtgggaaaacagcgacgagtctttcggcacttacatcaacaatagttccattacccccgtagccagtggtaaattgcagaccagcggaggaaaaacaacatttaaattccgtgtcgattatccgtcttggggacgctatctcgtatatgtaaaagacaaagatagtggccacgccaccggaggaaccatctatgtagactggccggaatcacggggacgttcgaacaagaccgatcccagcggtatcaagatgcttactttctcgctggataaagactcttacgagataggagaaacagctacggcaattattcctgcggctgccggagggcgtgcgttggtatccatagaaaacggttcgtccgtattgcaccgggaatggatagaggtaaccaacgagggagacacgaaatatacatttgagattactccggaaatggctccgaacgtatatctgcacatcagtctgctacaacctcatgcacagacaataaatgatttaccgatccgtatgtatggcattgctccggtatttgtcaccaaccgccagactgttctgcaacctcagatacagatgccggaagtattgcgaccggagacagacttcaacgtcacagtcagcgaaaaaagtgggaagccgatgacttacacattagctattgttgatgacggattattggatctaaccaatttcaagacacctgatccctggaatgaattctattcacgcgaggcactcggtatccgcacttgggatatgtacgacaatgtattgggagcttctgccggagcttacagttcacttttcagcgttggtggagatgcaacgctcaaaccggccgacgcaaaagcgaaccggttcaaacccgtagtgaagtttatagggccattctatttggaaaagggcaggcagcagacgcatacattgaaacttccgatgtatgtgggttcggtacgtgccatggtagtggcaggacaggacggagcttacgggaatgcagaaaagactgcatttgtacggacaccattaatgttactctccactttgccgcgcgtacttagtattcaggaagaaatcactgttccggtcaatgtcttcgctatggaaaaacaagtgaagaatgtgaccgtatcgcttcaggcgtccggtggcggagttcagatagaaggttcccatcaacagtcgctcaccttcaaccggcccggcgaccaacttgtgttctttactttaaagaccggaaacaaaaccggaaaggcaaccatcaaactgacggcaagcggtggcggacaacaaaccaaagaaaccattgaaatagaagtacggaatccgaatccgatagttacattacgcagcagcgaatggatagaaacgggacagaacaaagaattatcctatcagttaggaagtttgtctgcaaacaaccagataaaactggaagtatcgcgcattccatcagtagacatcagccgtcggttcgacttcttatataactatcaacaccactgcacggaacagttgacttcaaaagcactgccactcctgtttatcgctcagttcaaaacaatagatacccgggaagcagagaagataaaagcaaatgtacaagaagcgatccgtcagatttacgcccgccaactccccaacggaggatttgtctactggccgggaaatgccgttgctgacgaatggatcagttcttacacaggaatgttcttaacactggcgcaggagaaaggctatgccgtccatgcaaatgtattgaacaagtggaaacgcttccaacgtgctgccgcacaaaattggcgtatgcctcaagaggcaaacaactggcaacaatggcagtcagaactgcaacaggctttccgcctctataccctggctctggccggtgcaccggaatatggcgccatgaaccggatgaaagaacaaccgggattatctatccaagctaaatggagactggcagctgcctacgcactgacgggtaagatgaagcctgccgaagaactagtgtacaatgcagagacaacagtcatcccctactcttccatgaatcagatttacggttcgtccgaccgggatgaagcgatgatcttggaaacattacttctgatgaaccgggaacgggatgctttacagcaagcgaaagtcgtttcaaagaatctgtcacaagagaactggttcagcacacagtccaccgctttcgcccttatggcaatgggatgcctggcggagaagttgtccggctcgttagacttcacctggacatggaacggcaaacaacagcctgccgtaaaatcggctaaagccgtcttcgagaaagagatttccacttctcccaaatcaggaacggttgccgtaaagaatcaaggcaagggagcactaagcgtagaccttattacacgtacacagttgttgaatgatacgttgccggctatttccgacaatcttcgtatggatatcaggtatgcaagtatggatggtaaaccgatgtctgtcaacgatatccggcagggaacggacttcacggctattgcttcgatatccaacacaagcgggaccaccgattacaccaacttggcattgactcacatcatcccgtccggctgggaagtgtataacgagagaatgacggttcccgaagcagagccacaagagacaaccgactcgtccggtaatgtgagcggccaatatacttatcaggatatccgcgacgatcgtgtattgacttatttcaatctgcgccggggcgaaacgaagatatttacaatcaggttgcaagctacctatgcgggtaactttatccttccggctgttcagtgtgaggcgatgtatgacgtcaatgtacaggcacgaagcaaagcgggaagaaccacagtcagccgctaatgtagattctgtgcatggaacaaactcggttcatgggagacaagatattgaatttcttcaaacatttatccgtcactaaaagagtattgctcggcattattactcttttagtgataggatatatcttttgtcttccccggcaactgtttcatgttccctactctaccgttgtgacagacagaaatggagagttattaggagcacgtatcgcttccgacggtcaatggagatttcctccacgaaagacgacacccgagaaaatcaggcaatgcctcattactttcgaagacaagaatttctattatcattggggagtagacccgttatccatagggagagctacttatcagaatctaaaaaacaaacgtatcgtcagcggaggcagtaccctcacaatgcagacgatccgcctggcccgcaatgagtcacgaactttcggagagaaagtgattgaaatgattcttgccacccggttggaatttcgtgcttcaaaagaagaaatcctgtcgatgtatgtatcacacgcacctttcggaggaaatgtagtaggattggatgcagcatcctggcgttatttcggtcactccgccgaggatttatcatgggcagaatccgccatgctcgccgtcctgcccaatgcccccgccatcattcatttgtcgaaaggacgaaaaacactacttgccaaacgaaaccgtctcctgaaacaacttcttgataaagagattatcgactcatcgacctatgaactggctgtcagcgaaccgctgcctgacgaacctcatcccttacctcaaatagcgccgcatctggtcagccgattctatcaggaaagaaacggccggtattcccgcacgactatcaacaaaggaatgcagactcatatagaggatttggccgaacgctggagcaatgaattcaatcggagtgacattcgtaacctggctattcttgtgattgacattccttccaatcaagtagtggcttactgcgggaatgtacatttcgaccggaaacaaggaggaaatcaggtagatgtgatccaggctcccagaagcactggcagtatattgaaacctttcttatattatgccatgttgcaggaaggaagtatgttgcccgatatgctattgccggatgtgcctgtcaacatcaacgggtatactccacagaacttcagtatgcaatatgaaggagccgtacccgcttcagaagcattggcacgctcattgaatatcccggcagtaaccatgctgcaaagatacggagtacccaagttccacaacttcctgcaacaaataggattcaaaacgatcagtcgcccatcctcccattatgggttatcattgattttaggaggagcggaagctacgttatgggacgtgacgaacgcctatgcgcaaatggggcgaagccttgtcaccggacattcggattcagaaactcccgtttccgccaaagaagcggaagcgagaatgatagtagaagaagatactaaaaacagggccgtacagcataaaagtatctgggataaaggtgccgtgtggcagacattcaacgctttgaaagaagtcaaccgccccgaagaaattgactggaaagctatcccttccatgcagccggttgcatggaaaaccggaacaagctatggtttccgtgacgcctgggcagtgggtgtaactccacgttatgcagtcggcgtatgggtaggaaatgcaaccggagagggaaagcccggattagtcggcgcacaaacagcaggtcccgtgttattcgacatattcaattatctcccttcatcgtcatggttcgaacgcccgacaggagttttcattgatgcagaaatatgccaccagtctgggcacctgaaaggaagattttgtgaagatatagatacattgctagttctgcccgccggactgcggacagaagcttgcccttatcatcatcttgtcacactatccgccgatgaaagccggcgtatttatgaaaactgtgcaaatacagagcctactattcagaaatcctggtttgtcctgccacccgtatgggaatggtattacaaacaacatcacccggaatacaagtcgcttccgcctttcaaacccggctgtggggaagacaccttccaagcaatgcaatttatttatcctccgatgaacgcccgtatcaaactgccccgacaaatggatggcagtaaaggttttataacggtggaactggctcatagcaatcctgacgcaacgatcttctggcacctcgacgaaacttatcagacgcaaacgcaggacttccacaagatttccctgcaacctgctcccggtaaacattcactgacagcagtagacgatgagggcaatacagtttctactactttcttcgtcgaataaacagcttatttattatctttgcggcatgaaacagccattaaaagaaaacggaggactaccggcgtctatcctctggacacttgctattgtggcgggtatttcggtagccaatatctattacgtccaacctctgctaaatatgatacgccatgaacttggcatatcagagttccgaactaacctgattgccatggtcacgcagataggttatgcggccggactattgtttatcactcccttgggtgatttataccaacgcaagaagattatccttgccaacttcctcgtccttatattctcactattgacgattgccctggcgcataatatccatgtgatacttgttgcctcattccttacgggggcctgttctatgattccacagatattcattcccatggccgcccagttttcacgtccggagcataaaggcagaaatgtaggaatcgtcttatcgggattactgaccggcatcctggcttcacgcgtcgtcagcggactcgtcggtgaactgttcgggtggcgggagatgtattatattgccgcaggtatgatgtttgtctgtgcggttgtcgtactgaaagttcttcccaacattcagaccaacttccggggaaagtacagcgacctgatgaaatccctgctggctttggtgaaagagtttccgcaactacgcatctactctatccgggctgccctgaacttcggttcgctcctcgccatgtggtcctgcctcgctttcaaaatgggacaagctccattcttcgccaatagcgacgtgattggtatgctgggactttgcggagtagccggagcattaacagcttcttttgtgggaagatatgtaaaacgggtaggcgtccgccgcttcaacttcatcggctgcgggttgattcttttgtcctggttattgttcttcgtcggagaaaacacttacgccggaatcatcgccggcattatcatgattgatatagggatgcaatgcatccaactcagtaaccagacgagtatcttcgaactgaatccccgcgcttcgaaccgtatcaatacaattttcatgactacctacttcatcggtggctccatgggaacattccttgccggaagtttctggcaactgtatggctggcacggcgttatcggtatcggagtccttttaaccggtatttctctattaattacgattttctttaagaagtgagtcaacaaaatggatgataaaaccgtttaatacaaaaaatcagtaaactatgaagtacggagttaacagacaaatcttactaatcatagccggcaccgtctggattattgcgggcggaaacatcctgcggataggaatcgtcacctggatgaacaactcacacgactggatgtttaagataggggaagccactatcgttttcctgttattcttcgtactgatttttaaaagactctactacaagcatacccgccggattgaacagaagaaagaaacccgcaactgtcctttctctttcttcgatgtaaaaagctggataatcatgatattcatgatttctctcggaattacgatccgaagcttccatttgctacccgaaagttttatctctgtcttctacaccggattgtccattgcgctgattctgacaggaatacttttcatccgctattggtggctgaaacgtaaaaccatgctcaactaaaggttaactctttctatattccaagaaaatataaacttataataatttttattgcccgctcccataatgcaaaagatttctacctttttgttgtatctttgcagccaaaaataaatatcagctaaacaacaaaaaaaggattagagaatttagcatgaaaaaagctccttccccactcgtatcactgataccgattattgtacttgttctattattattcgctactatccatactttcggcagcgacgcactgagtggcggcagccaagtgtcactgcttactaccaccgcagtctgtatccttatcggcatggcattctacaaaatcccatggaaagactacgagctggctattacaaacaacgtagccggagtgacaactgctatcattatcctgctgattattggtgcgctcagcggtatctggatgattagcggtgtagtgcctacgctgatttattatggaatgcagattatccacccaagtttcttccttgcatccacctgcattatctgcgtactgatttcagtcatgaccggaagttcgtggactacaattgccactatcggtatcgcattaatggggatcggtaaggcacagggatttgaagaaggttggattgctggagcgatcatctccggtgcctattttggcgacaaggtatctccattgtcggaaactaccatattggcagcctccgtcacagacactcccctcttccgccatatccgctacatgatgataaccacgattccttctcttgtcattaccctgattattttcaccgtagcgggattctcacatgatgccaacaatacgcaacatatcacggaggtggccgccgcactgaatgagaagttccatatcacaccatggcttctgattgttccggtcgccacgggaatattaattgcacgtaaggtaccttctatcattacgctgttcctgtcaacattgctggcaggcatctttgccctgatatttcaaccggatttattacaggagatttcgggaatggctgcctccggcttcgattcgctgttcaaaggactgatgatgaccttctacggaagtacaagtctgcacacagataatgccgttttgacagatttaatcgctacacgtggcatgtccggcatgatgaatacgatttggctgatcttatgtgccatgtgctttggcggggcgatgacagccagcggtatgttgggaagtatcacttctatctttgtccgttttatgaagaaaacagtcagcgtggtgggagctacggtttgttccgggttgttcctcaatctggcaactgccgaccaatacatcagtatcattctgaccggaaatatgttccgcgacatttatgctaaaaaaggttacgaaagttgtttgctgagccggacgaccgaggattcagtaaccgttacatccgtgctgatcccctggaatacctgcgggatgacgcaggctacaatactaagcgtccccacattggtatatcttccctattgttttttcaacattatcagccctttaatgagtattgccgtcgcagcgatcggatataaaattgcgcgacgctcgtgaacaatctggcacagactttgtttttgcaataaacggacaacgtattaaacctaaacaaaaaaaagttatgaaaaagtttattgcattattagcattagtattagtaagtgcaagcacgatgatgtatgcacaggaaagtaacgcagcagcacgccgcgcagaaagaaaagctcaaagagatgcggaaagagctaaactccgtgccgaagaacaggtgcaggacatggcagcttatcaacaagccgtacaggctttgaagaataaacagttcgttctggaagccaatcaggtaatattccgcaatggcatgagcgcttttgttacttcaaacactaacttcgttctgatgaacggcaacagagccacagtacagactgctttcaacactccttatcccggccctaacggaatcggtggtgtcacagtagacggtaattcttcggacatgaagatgaatgtcgacaagaaaggtaatgtgaactgctcattcagcgttcaaggtatcggtatctccgctcaagtatttatcaccatgagcaacggagacaacaacgcttcagttacaatcagccctaactccagcaacaataacctgacactgaacggaaatatcattccgctcgaccagtccaacatcttcaaaggacgttcctggtaatcgggatacaagaatcttggaacaactccgctacaaatcgcgcaaaatgcgtacatttgtagcggagtttttttaattcattaatttcctatgagagaatatatcatcgcagacaatcaggacatcagtaaagcggggatgatgtttctgctaagcaagcagaaagatgttgccaccctcttagaagctgacaacaaagcagaactgattcagcagctccggttgtatccgcaagcggtggtagtgctggattatacgctattcgattttgccggggcggatgagctgattgtcttgcaggaaagattcaaagaggtcgactggattctgttctcggatgagttaagtattaattttctccgccaggtattgttcagcagtatggctttcggggtagtgatgaaagataattcaaaagaggaaatcatgactgctatccaatgtgccggccgtaaacaacggtatatctgcaatcatgtcagcaacctgctgctttcaggcgctgcttctcctgtggccggcacaatgacagaagaccatttgctgacgcaaacggaaaagaatatcctgaaagaaatcgcactggggaaaacaacgaaagagattgcagcggaaaaaaatctaagcttccatacaattaacagccaccgcaaaaatatcttccggaaactgggagtgaataatgtgcacgaagcgactaaatatgcgatgcgggcagggattgtggatttggcggaatattatatctaaaaacaatctacttcacggcgtcaatccctgcaagaagctcttcatccgatttccccactccccacgcaaacctgcgcagcctcatcataaacaactccgaactgtccgggggcaatgccctgtaagttttcagaagacaagatacgaaactgcctctctccttcctgcacaagtttccctttcgtaaattcgggagtatggcgaatcttgaaagtgatgtctatctcctttcctgctgactgccacggattatccgtaataaaatggaaatcgttgatgcgaagttcattgccgtattgtgttttcacaccgtaaccacgggacacatagataatattctcctgaatatctttctttatcacaaaccaaggaccaccacttaatccgagccccttgcgctgaccgatcgtatgaaaccaataaccccgatgcgtacccagtttcttaccagtctccagttcgataatcatcccttccttttctcccaaaaagcggcggacaaaatcattgtagtttatctttccgagaaagcaaatgccctgactgtcttttctccgagcactcggtaagcctgcattcaacgctatctcacgcacttcatgcttcatcagtccgccaatgggaaacatcagcttggaaacttgcagataatctatttgtgcaaggaagtccgtctggtcctttacaggatctttcgctgtcccaagccacgtcttaccgttacgttgcaaggtagtggcgtaatgtccggtagccgtataatcaaagtcttttccgatacgctgttcaaagcagccaaacttaataagtttgttgcacatcacatccggattcggtgtcagccccttcttaatcttatcaatggcataggccgccacattgtcccaatactcgcgatgtaaatccaccacctccaaagacagaccgtatttacgggcagtagcggtagacaattcaatatcttcctctgccgaacaatccatatattccgtcccgtccatgccgatcttaatataaaaaagagtcggcttgtatccttgctcacaaaggagatgtacgaccaccgaactgtcgacacctcccgataataatgcagctatatccatccaaaaatcctattaatacctattgataactttgatatggcaaagataagggcatatccgctaacaaccaatcacacattgaaggcatttttataccataaatgtggtagataagcaaagtatttcctacatttgcacagtgaaaagctttttataatgacaaaattaagaaagataatccttatacctgccctggttatcgtatctatcagcggctttttctcctgcggtgtcgaccgctggccggagtatgcccacatgactgcattggacacatggatgtacgatatcatgcaacagaactatctgtggtatcaagacctaccttcctacgatgatgcgaatctgtttctggaacctgcccagttcttgtcaaaagtaaagtcgaagaacgacagttattcgttcgtcgattctgtcatggagactccgctgccaagctatggattcgactattcattggttcgcaacccggacattgacactgcttacaacgcactgattacttatgtcattcccggttctccggccgcggccgtactgaaacggggcgactggattgtgaaagtagacacctcttatatcagcaagaaatatgaaagccaactactgcaaggtacggaacccctggaagttactttaggaaaatatcaattagttccgcccacagagccaccggtagaaggtgaagaagaagaaatttaccgggttgttccggtaggtgatccggtaaagattggtgcagccgtaccattggtagacaatccggttcactgtaagaaaacactgacactgaccgatggaagtgaagtcggctatctgatgtacaacagttttacggcaggcaccaaagagagtccggaaaaatacaacgccgaattacgcgaatggtcggatgagcttgctcagaagaatattcacgaggtaatactcgacctgcgatacaacaaaggaggaagcattgattgcgtacagttgttgagtacgatgcttgtgtcttcttattatcttgaccagacaatgggatttctggaatataatgacaagaacacggataaagatgtgaccctgacatttgactccaaacttttaaatacctccggcggcaagaacctggacttaacaacccttatcgtcctgattggcggagaaacagcaggagcaccggaaatgctgatgcactgcctgaacggaaagattcaaaaattaatagctatcggcagttcaacaaaaggacaaaatgtagccacggaacaattcatcaacgaagaattccaatggtccgtcaatccggttgtagctactatctatgactccgagcatgatacttaccccggattcaaaccgacatactcagtcaatgcttcaacagattacttaactttcctgcctttcggtgatgaaaaggaaactttgttgagtgttgccctcggagtattgaacggaacttatccgcctaaagaagaggaagaagaaactccaagcacacgaatcaagatagagaaaagtgtgaatagtccttcgagccggttgttcataggaggaagcggattaagaatcaaataatagccagactacaatttcggcattcttttgtcaagagcagatttatgcatcattaacagaaaaagcggcattactccgctttttcaaaacgcacgctctaaatctacttaacagagcgtctgtttccggtaaacagagcgtctgttccgacctgacagagggtgtaatttgtcgtagtccgtcagctaaagtgctttcatccccgagcttacacccgttatgagccgggatcaagttctcacacatccggcatacaataaaaaaaggagaaagccaatgctttctccttctatcgtagtttaacctcaatctattttatgattatgtatccaaagatacgacatccaaaagctaaagtcaagcattagcccttttatttcttgaaaaacttatcaaagaacagaatctgatagtcaatggagttattccaatacttcccgttatgtccgccgggacgagtgataaagtcatggttaatcttccgggccaacagacggttatgcaaatccttgttcacattcagaaagaaatccgcttcaccacagtcgataatgatagccaaatccccgttttctatcttgtcaatctgattgataaccgtatgttcatcccatacctttttattgtatgcaaattcgcccaactgtttcgacatatcccagttcaacgggaacggacggatatctaccccgccactggtacttccaccggcaccaaacgtatctttatgacggatagcgttccacatagccccatgtcctcccatgctcaatcctgttatggcacgtcctttcctgtcagcaatcgtcttataatgtccgtcaatatacttcaccagttccgatgaaacaaaagtttcgtaacggtaagacggatctttcggactgtcccagtaccagctattctttccgtccggacaaacaaagatgattcctttttcatccgcaatctgcggaagatccggtttcaccccgatccatgttttagcatttccaccataaccgtgcaacagataaatgacgggacaagccaccgctttcttgcccaacgcagcgtctggtgtaacgaccaccacctgtacatccttattcatggaagggctattaactaataaagtatctactttggcagcaaaagagggggccaccaatatcaataataaagcagctaacagaagatttctctttttcattatacgtatatagttagattaaattattcttcctccttttcctctgaagaagggaacttggcaacaggcacctcaaaagtccgttggcactgtccgcaggtatattcccaatgattatctcccggaggggctgccgccaacatggaaagtattgccgcaccgacagcacgcagcctctgtcctttttttaacctgaacttaatatccgacgacccgcaataagggcaaagcgtcaattcttccggccaactctggttatctctcaacacctgaacggctttctcataatcatcatccgccaccagaatgtccactcccgctatgctgctcacacaactcttatataaggtagagaagttttcattgtgcagaatagattcaatcccttcgttctccaacgctccctgaaggatatgtgccttcatcgcgtcattgcaagtaatcagttttacagtcttcataaggaatctgtttttatatttcccacaaatatagaacatattctttttttattcactgaatatatcattctttaatacttttttcgtactttcgcagcactaaactgcaaccgcatgaaaagattgttgacacttctactgtttttcaatactatgctccttctgttgcaagcacaacctatgcatcagataaagggaacggtgattgacaagaatagtcgtcagccattggaatttatcaatgtgatgattatcgggctgaataagggcagtgtcaccaatgctgaagggcgtttcaccattgaacaagtgccgccgggcatttaccgcctgcaagcatcggcaatcggatacaagagcgttacgacctccgaatacatcttatctaccaaaaacctgaacatcccgatagaaatggaggagaacctgaccgaactcgaaggagtgacaatcaccgcctcccctttccggcgcgatgtggaaagtcccgtcagcctgcgcattatcggaatacaggaaatagaaaagagtccgggagccaaccgggatatttcacgcatcgtgcaatcttaccccggagtcgccttttcaccaataggataccgcaacgacctgattgtgcgaggcggggcgccttccgaaaaccgcttctatcttgacggagtggaaatccccaacatcaaccacttcagtacgcaaggcgcatccggcggtccggtaggaatcctcaacgccgacctgatacgggaagtaaatttctataccggcgctttccctgcggataagggaaatgcacttagttccgtactcgacttcaagttgcgcgacggagatatggaacgcaattcattgaaggctacactgggagcttccgaagtttctttggcttccaacggacatataggcaagaagacttcctacttggtttccgtgcgccagtcttatctgcaattcctgtttgatatgctcgatttgcctttcctgccaacctttaccgatgcacaattcaaactgaaaacccggtttaacgagcagaatgaactgacggtattaggactgggcggaattgataatatgcggctgaatacgaaagctgacagtgaagacaatgaatatatcctgagttatctgcctaagataaaacaggagacatttactgtgggggcagtctatcgtcattatgcaggtgcacacgtgcaatcggcagtagtcagccatagctatctgaacaaccgtaatacgaaatatcgccggaacgatgaaagccatccggataacttaatgctccgcctccgttcgaccgaacaggaaacgaaactccgtctcgagaacagcactactttccgtaattggaaaatcaatctcggcatcaatctggattacagccaatataccaacactacctttcaacgggtgtacactaaccagccgcaaacttttgattatcacacgtatttaggaatcttgcgctggggacttttcggaacgatcaattacacttcaatggacgaccgcttcactgcctctctaggtctgcgggccgacgccaatgattattcatcgacaatgaagaacctttccgaccagctttctccccgcctgtcactctcctatcaactagccgatcattggtttgcaagcggaaatgcgggactgtattatcaactccctgcctacacggctctcggctttaagaataataacgggactttcgctaataaatacaacctccgttacatgaaagtgagtgaaggaagtctgggaatcagttggagaaagggagataccttcgaagcatccgtagaaggattctacaaagattatgataagatccctctttccgtagcggacgggattcctcttaactgcaaaggaaatgattatggagtagtcggtaatgagttacttacttccactgcacaagggcgctcctacggtgcggagattttggtgaagtggcttattgccaagaaactgaatctggcttcttcctttaccttgttcaagagtgaatatcgcaacgataaagaaagcgaatacatcgcctccgcgtgggacaaccgctatatattcaatctgcgaggaacgtataatcttccgcatcaatggagtttcggcatgaaggtaagctgcatcggcggtgctccgtacactccttatgacgaagccaaatcgtctttggtatcagcatgggatgcacagggaaaagcatattacgattactcgaaatataacaaagagcgtctccccgcttttgcgcaggtggatgtacgcgtggacaaaacgttttatctgaaacattgtatgctgggattttatctcgatttgcagaacatcacagtcagcaagctgaaacagcaggatgtgcttatgagtaccggcatcatcgagaacccggaagctcccgccgctgcgcaacgatacaggatgaagcgcattaaacaatcaagcggaacattacttccgacactgggaatcacatttgaatattaaccatagtttgaaacattaattgaaacgagaatgaaaagacaaattgctatgattgccctattgtttttgggtatgggaatgacagcttcggcacaattcggaaagaagtttaatgtagggaaagccctgcaagctggaaaagacgtagtatcggcagttaccttatcagacgcggacatcgccaacatgagtaaggaatacatggtctggatggatgcacacaatccactgacaaaacctgacactgaatacggcaaacgtctggagaagctgaccggacacatcaaagaaatggacgggctgaaactgaacttcggtgtttatgaagttgtagacgtgaatgcttttgcctgtggagacggcagtgtacgtatctgcgccggactaatggatgtgatgactgacgaagaagtaatggcagtagtaggacatgaaatcggtcacgttgtacacactgactctaaagacgcgatgaaaaatgcctaccttcgctcggcagtgaagaatgcagcaggtgcagccagcaacaaagttgccaaactgactgactctgaactgggagcaatggcagaagctcttgctggcgcacagtattcacaaaagcaggaaaacgaagcagacgaatacggtgttgagttctgtgtaaaaaacaacatcgacccttatgccatggccaacgcattgaccaaactggctgaactggcaaaagacgctccgaaatcttcttatgtacagagaatgttctcctctcacccggataccgccaaacgcatcgaacgcgccaaagccaaagcagacagctataaaaaataaggagtatctctcgctttatcttatataagaaagggaatacagaggcggcttcgcctctgtattccctttctcacttccaatacccaaaaagacaacacgattattaaattttcattaatatattacatagatttgcatagtgtcgtgatttcatgtaatttcgaggctataaccattttaatccatttatggaatttcttattatacttttcttactcgtactgaatggcatttttgccatgtacgaaatcgcgctggtatcttccagcaaagcacgtcttgaaactcttgtagccaaaggtaacaaatctgcccgaggagtattaaagcaattagaagaaccggaaaagtttttatctactatccaaatcggtattacacttatcggtattgtgtccggtgcttatggtggagttgccattgccgacgaccttgttcctctgttctctcttattccgggagcggaagcctatgcgcgcaatctggctatgattactaccgtggcagtgatcacttatctttctcttatcatcggggaactggtacctaagtccatagctctcagcaatccggaaagatatgcaatcttattcagcccgataatgattctgctgacaaaaatctcttatcctttcgtatggttactcagtatctccacccgcctgttgaataaactgatcggactgaaaagcgaagaacgccccatgacacaggaggaaatcaaaatgattctgcaccaaagttcggaacaaggggtgatcgacaaggaagagacggaaatgatacgcgatgtattccgcttctcggacaaacgtgccaatgaattgatgacgcaccgcagagatgttgtgatacttcatcctgacgatacgcgggagaaggtgatgaagactatcgaagaagaacattacagcaagtatctgttggtggacgaacggaaagatgagataatcggtgtggtgtccgtcaaagatattatcctgacaatgggcaatcagaaggagttcaacctgcgtgaaatagcccgtccgcctctctttattccggaaagtttgtatgcaaataaagttttagagctatttaagaagaacaaaaacaagttcggagttgttgttaacgagtatggtagcacagaaggtattatcacactgcacgacctgaccgaaagtatctttggagacatcctcgaagaggacgaaacggaagaagaagaaatcgtcacaaggcaggacggttcgatgttggtggaagcttcaatgaacatcgacgacttcatggaggaaatgggaatcttatcctatgaagacctggaatcggaagacttcaccacgctaggcggactggcaatgttcttgataggccgtatcccgaaagccggagacatcttcacttacaagaatctgcaattcgaagtagtggacatggaccgcggacgagtagacaaactgctggtcatcaaacgggacgaggaggaatagatttatgacaaaaacgagcgatagctcactatatttatattaacttaaagcacttaacgatgaaaaaagtaattatgttagcagccgtcgtagctgctttggcatcttgccaatcaaaagccaacaaaaccgcagaggcagaagcagacagtctggccattgccatgactccgattaccgaactgacagaagtttacgaaggtactcttcctgctgccgacggtccgggtattgactatgtactgaccctgaacgctgcaaccgacggcgtagatactacgtatacactggatatgacttaccttgatgctgaaggtcagggccaaaacaagacgtttacctcaaacggaaaacagcaaaccgtacacaaggtagtgaacaaaaaacctgttacggctgtgaagttaactccgaaaaacggtgaagctcccatgtattttgtaattgtgaacgacaccacccttcgtctggtaaacgatagcttacaggaagctgtcagcgatctgaactatgacatcatcaaagtgaaacaataataaaagaacctaaccctaaccagtaaaaatgctctgcgagaactgaacgttctttgcagagcatttctttttttaccttgtaatattatattcgtatcgttactttccgcaacagactggtataaatatttatccttgtactgtttgtccttcccgcaaacgttttaatcttagcaatgcttcgatataatagtagtctgcataaataatagacgcatctatttccgaatgattcggccaatgtcctacactatgcaataagaatgaaggtttacttttgccactctgatagtggcgggaacttagacttgacaacatttcgattgcagcgtctttataatattttccttttccattcggaagataagtggacagttcgagcaaggcggaagctacaactgctgctgctgaagcatcacggggagcgtccggtattcccggatcgtcgaaatcccagtagggtactttgtcttcaggaagtctttccaaatagacatccgtcactttctgcgcaaagtcaagatatttagggtctttcgtttctcgatagactactgtgtatccataaatcgcccatgcttgcccacgcgcccacatagtactgtcggcatatccctggtgagtgacacctttaatcagattacctgtaattgtatcatatacagcaacgtgatacgaagtatagtcgggacgaaagtggcatttcatggtcttgtcggcatgtgctaccgctacatcatataagtagggattgccgccgttctttgccgcccaaaaaagcatttcgaggttgatcatattgtccatgattgtattatgcggccagttacgaggttctacttcacgaggccatgaaagtattgttcctactaccggattgaataaagtagccagtgtgtcggcagtatccagaattacttgtttatatgccggattcttggttagccgataaccgtttccataactgcaaaaaacaaggaatcccaaatcatgatcgaaagccggaatcttggaaagaaactccagagagttcgtaaacttctccgcttcttccttaatatgcttatcttgcgtatattcataatcataccacagcactcccggccagaatcccgcacaccattcttctttcgtcgctttacgacagttccaatgttgctcatcggccatgatattacgcggcatcatcgtataatcgattccggaatctgttttcagctccgcaagcgtacgttgtgtctgctctgcacagtaatccaatgccttattcacatctaatgtaccggaaggctgatgagcacacatacagaaccctaacatcacagccaaacctactaccaactttttcatcttaatcttactatcttcgtattaattcttaatctttatttctctttgtcagttatctatcaattacttagtcatccggaaccagtctatatccgcccaaccacgatttccttcgttaggagtcacacagaatacaccgactttagctcctatccacttgccttgacgggcagtgaaagcctctcctaccgtcgtatatttctttccgtccagactataagcaaatgtacagacagcacctctacggacttttactcgcaaataaactgttttccattcattatctgctacaccgggcatcttcagatattctaccggtatacttgccaactcttttacctgttcgggattctgccgttccgcatctttacaaacagcctgttgcagaataaatttatcccccgccttgcgaatcgaaagataactgtaatcccatcccattacaatgagtccggcttgttcaccattctgtttggcggtaaacgtcaacttagtggtagctgtaaattcttcggccggaaacttctgcatcaacagattcggcacctcccagaagttcacaaattctttcgagagactgcccgcatacaggcgaagatatcccaaatcggtagtgaatccataagtatcttgcttattagcgtgccattgccactgtaaccctaaatgccgggtattgaactcatcactctccggtggagtggttatcggataagtctttcctacattcggtttcttataagtagtcacaggttcaccgcaaccgtccttgtctttatccgctccgattaccggccagtcatttacccagttcatcggattcaagtgaatcacacgtccgtaagctcccttatcctgaaaatgaataaaccaagactcacccgtattagtatctacccaaccgccttgatgaggaccgtttatattcgtctgcccttgtaccattacaattttcgactcataaggtccatagatgttcttcgagcgaagcaccaactgccaaccgttagccacaccacctgccggagcaaaaatataatagtatccattccgtttatagagtttcgggccttctaccgtatgattctttccgtcgttaccatcgaataccattaccggatcagaaacgacttccgttccttctgcattcaattctgaaatcacaagaatactgttcaccccactacggcttccggcataggcatatatcagatatactttcccgtcttcatcccacaagggagtagcatcaatcatcccttttccggctttcaccaatacggggttactccatttgcctttcgggtctttcgtctttatcatgtaaatcccatagtccggatcgccccagtagatataaaactctccgttatggaaacggatagacggcgcccatacccctttaccatgttgggccttatcgaaaaattctttcggttcctgcaccggcaacgcatagttcaccaacgaccaattcaccaaatctccggagtgaaggataggaatgccgggaatgcaattaaaactggatgccgtcatataaaaatcatctccgactgcacacacatccggatcggaataatcagcatgaagaaccgggttctgataagtaccatttcccttatcagccacccaggtcttagaaatttcttgtgcgcccgcccatgtgcagcaagccatcatccctgccaaaaacagaatctttttacgcatataccttactaatcaatttcattctaaattcaatcgttattcctaaaaacagattctttctacctttataaaaaaactaaccaaccgaaaaaccgaatctaataactttcatttcaaacaatctatttgcttatatatacgaaggggattaagtaaatacctaatcccctccactatttttttctataaagcttcctattattctttcgtatacatcaaagtcccgaatcccagttggtcgaatccgccgctagtagaaccgtaatgaccaccgccaccttctacacccataccatccataaactttttagtataataagcttctatcccttttgttttataatgatagtagatcagtgcccaacaaggacgaatctctcctctcgacttatcattttcttctttggaagaaagcgcaggacattgccaactacagttctcgtaaaaactataagggaatccctctttgctatacacaaatttctcattggaggtagaagaccgatcatcaaagtctttccatagattatacttagccgtgtattctgccatagcaagtactttattatcctgataagcaaaaaggtcctcgccgatattatatgccatttggcagaaagcacccatcaaagcaatacaaagtgtagcgtgcccctggtcacggccggattcctgtccttggcccaatactccgtgtccatccggatcctgatgaagaaaaggaacagcgttgtctatactaccattgcctactccatacttaaaatacaaaatagcctcattgattttgtcctgatcatcacaaagaatgccgatagagagaatcgatgtcatctgagctaaatcccagttaagccagctatgctgtttgcatgcttccttatgagccagaaaatcagaagcggcaggataaaatacattcttcatcattgtctggaacgccgacaattgagcttttgtgaagagcgtctcatccgtacgcataatttcggcagcattagccatttggtggacattaatagaaataagatattcgttcggatcggctatttcaccattcgcgtcataggttctatcatttgccaaactcttgacacggaccaatcctttgcaagtttcagcccaggcattcaatatcttaacggctgtttgcccgcaagcaacgtcaccttccagtttccaacgaagtgccagctgataagcagcggcagcgtctttatagaaataagtatagttattccaccattccggaaacttgctggcccagttcccctggtccatacgtcccaatacctcctgcggcgtaggaacatatcccgcataggaatatccggagttcttcaatttatcatatccttcactccaaggagctacggtcaactttgatgcaacataagataaatcggctgcagtatgcagcatacagggatgagcaagggtatactcattaatagcaggccacgaatcaatatcggtagtaccatcttcgatgtcggtgcatgcgctcaaatggagcgcaagcatcgtaaacaggatgaatatatttctagttctcatagtctttattaattattagtgttttcattttcaacgaaagcttttaaatcctcaatagttttgaaagtccgtacccaatatactgtatattccgtatttgagccgttagcttctttgaagtccgccattacaaattggagtgtctttatttcttccggttctgttttagagaaagtatggaaaggtttattcgatccatttccaacagcattttctctttgcagatcataataatatacttccggacttcccggagtttcagcaccgtctaatattgtatatttattacttccactgccactattctccaaataggcaccatactgtgtatcaagtttaatgttaccttgcaatttaccagctccataaggtcggatcatttttatggccagataaggatataccccaacattcaaatagaccttatctttataactgccatttgacgtcaatacaagatccgcacggcaagaatttccctttgaaggattaggaaccattttcacaactgctcctcctgctttaaactcggcagatgaagtatacccatccgcctgcttcaaataccaaggagacaatgaggtatcaaatgaatatttcatcaagccataaggtactttaaccgtagttgtatacgaaacttcagttgtcgtagtggcggtaatagtagcttctccataagctttggcggttaccacaccctgatcattcacctctataacatccgtattactactggaccactttaaagaagctatagtcgcatccaccggaacggttgtaaagttcagtttagcactttcgcccggcaataaatcctcctgctcaccaaatgtcagactttcaacatatataatcggtataatcttcaaatcaaaggattcctcgtaacctcccctatctaaagaaatagcagtaatagtgacagtttttcccgttgtactcgtacctccgttaacacctctcactacaccttcttttgtcacagtagcaatagattcatcactactcttccaagtcaccatagaataagtgtgtcctgccggcaacagagtggggcgcaaactcctctcttcggaaacatacaaatccttcttatcatcatccgtaaactcaaaatccgcaatcggaataaactccggtactaccgtcaattcaaaaaaggtgcttgctccgaatccaatttcaggagtcacaacaatattcgccttgcctgcactcaccgcatgtacaagtccgtcttgtgttaccgtagccacattttcatctgacgaagaccagcttaccttcctgttggtcggctgttccggtacaatcttacactgtatcaaagagtccatatagtccacagacgcagccaaagtcagttttccattttctacgttagccaatgtaatctctgaaatcaaggtcttctcctccagtccgtctccatactctttactatcatcacatgcagtaaaacagatagccgtaagaaaagccaaactaaataatgtatatctcataattatattctttataatcttcggtttataaatacgttaccatcccggattctgaccgatgttgggattcaattgcttctgatcggatggaatcggataaagatagttcttattttcccaaacacgatccgtttcaatcatcaggcatcccgcaataccggcatcatctgtatccgtagagtatgaaggtttccaggcagtggcccatgtactccaatcacccgttgtactccatttcactcccaacatatttttaggcatttccacttcagccgtcttccaacgtttcaaatcgtctatacggaaaccttcattgaaaagttccaccgtacgttcacgacgaatctcttcccgcagacttaatccttttgttgcggcaaacgagactgtcaaatccggcatatccggatttacccgtttacgaacttcattcaaatatttcaaggccgcatccaccttagactcatccgtaatgcttccatcggtagcagcatatctctcgtacacagcttccgtataattcagcaatacctccgcatagcggataaccgggaaatcatatccttcatacgtatctttcacatcacgctcagtagcccatttctgattatgatatccgctgccgctagtgggatagaatggtttattgtcaaaagccgccttatctgcatccgtccaggtagtatggggcgcgttattattccaatatctatttccgggaatcatcaatgtgttgttcatacgattatcgcgtttggcatattcctgttgaggagaagaatagttcactcctactgtagaattcggattatgaataggaagtccgtccgcacccaaatacatttcggccaacttacgcgtaatccactgtacattggcaaagcaagctttcgttatattctttccaatcggagcaatcacttcatcatgacgacgagagaaaatgtactctagattcttggcctttgtaatattagccggattggattgcgcgttttccagaatgaacagatatttgtaagctgtcgttcccaactcttccggtttaaagatttcatattgcttgctgtcaatcacatcccaggcagcacttgccgcaatatccagcaaatcattaacccgtgttacgtcgcccgatctgaacttctgccaagtcccttcatacaatgccacacgcgacagaaatgcttgagccgcacctttagaaacacgccctttatcggcagtagaaatctcactttctctcggcagatcaggaatagcttcctgcaaatctctgataataagatcggctacttccgaacggtcattacgagccgcattcatttctgcagcgtctatatcaaccggtttggtcacaataatcgcatctccgaaaagctgtaacaagtcaaaatactcataggcacgaaaaaacttagcttctgctacatagcgcgctatatcattcagattggcataattctccgcattctgtaataagatattagcataacggattttagtataggctcctgtataattaccatccgatacaggaatcgtattgactcctttactatattcattgtagtcactagatgtgatcaggtccgaacgcgtgtcactatgcggcccatcgaaaagagcagcagcaaaatcacgcggccattcataaaattgattggcatataatttataatcattcggagtctgccacaaattcgcatctgccaactgagccttaggatcaagatccagacaagaaggaagagttatcaccactgacagcagcaatattgcttttattatatttataatcttcatattctaactattaaaaggttaaatctaatcctacggtacaagtacgattgaagggaaaacgaccgtttcctgaaactttacgggaagcttccggatcccatccgtcgttaattttactaacttcccacaagtcattgcccgacacatagacacgcatcctgctaatcactcttatcttgttcagaagcgaagtcgggaagttatatcccaatgtcacacttttcaagcgcaaataattaccattttctaccgaccaggacgaacactggtagttataatcgtttatagagtttatattcgtatatgtcggataacgcccgcctctattttcagggctccatacatccccgaccgactgtgtagtcgaatttaaatgagcggctttcatcgggatacggtaattatcattgctactgtcgcggaaaatggtacgtttggcaactccctgaaagactgcggagaagtcaaagttgttccattccagccccaaattgaatgaataagagattttcgggtcatcagaacccagatacacataatccttttcatctagtacgccatccccattcacatcttcatacatattatctcccaaacgaatatcgctcggaataccaatcccgtttccgttgtagtattgatatttatatttacgcaattgttcctctgtctgaatctttccgcagtacttcaatccaaacactgaatttagggaatatccttgttgcttgtctataaatccggatttgaaaactgttactcctccgtagtctaccaatttattatccgcgtatgtaaacgtaccgccaatgtggtaatttactttcccgattttgtccgaccatgtcaaagtgccttcataacctttcgcttcaaacttaccgctattggaagcaggtgccttgtcacccaaaatgcccggataagttacagcaatcaacatattattgtttttcttcataaacagttccacagtaccttgaaggcggctattaaatagttggaaatccacacccaagttataattatggatccgttcccaactacgccccgtagtagcaatttcaccgttactctttacgtaagatactctgccgtcacccagataagctccgttcacagaattgaagttataaagttgtctgccatcataacgagatatcccggactgattacctaccacaccatacgaaagcctgagtttcagttcgttcaagaatttcacattcttcataaaattctcttcagtaagacgccaaccaccggaaaagccataaaagaaatcccaacggttttccggaaggaacttggatgatccgtcataacgcaagttagcttccaatagatatttcgacaaatagttataattgaaacgtccgaaataagacatcatcgcttcctgccatttgtcaggcgaagaagttttggcagagttctttaaaaaaatatcccccgagccgttaagtatttccagcgaactctgtacgtcctttgccgtcacaactgtataatcatattccttcagattgtactgggcacctaacatcgcactcaccgtatgcttttccgcaaatgtctgatgaaaattcaaataaccggaaacagaatagtagtccgtacgcgcaaatgatttggaatattcggtcgatgcctgattcggattatagatcgcattgggtttcgctgtactaagcgtcccgtcataagtgtaccaggtaatactatttttcactgcatcgcgagtagcagtagaagtattatatcccagattaaccactgcgtccaaataagaagtgagcttatatttcagattctcactgatattgataccggaaaccttcaaattattatctccacctaattcagcataccagttgggagtatagtttcctccccagtgataaggtttaccatccattgtagaagacggaagtcccggctgcggataactggaggtcagcacactgccaatcatagtaggagaaacctggtcctgacgattatacgcaatcacggattcaattgtaaagtcatcggtaagttttaccgtgttagtcagacgaagattgaaacgtttattgctattattaccccatttcaatgtactatcatcatacatatatcccactgacaaacgatacagagatttatcatttcctcctgaaacgcttaggttatgttgcgtggaacctgcatttccaaataaaacatcctgccagttagtatccatgaatacatagtcgtctacatccccgaacgccgttattggattggggttaacggacaaatcaatatatcctcctttataagctttcgccaacttagcatactggatccactggtcatcagcacctttaccatcattcgtacgagctgcaataatagcatcactccattggtcaatactcatcatcttaggttgcaaccctacaaacttatgtgtataagaaccactatattctatctttgctttcccttctttcgcctgctttgtagttaccagaacaacacctccggctgctttcgaaccataaatagcggcagaggcatctttcaaaaaattgatagactcgatatctgccgagtttaacagacgaagttcattcacactctcatactccaccccatcaatgataaccaacgggtcagtagaattggcagatacagcaccacgcagtttcataccccagctttcatcgcccggagcaccggaagaacgggtaatgattacccccggaacttgtccttgcaaggcttgtacgggactggacattgatcctttgtttgtcagcattttatcagatactaccgttacggcaccggtcaatgtttctttcttctgcgaaccatatcctactaccacaacttcgtccagcacttcgctgtcttcctgcaattttacattaatcaccgtttgcgcagctacatctataatctggtccttatatccgatatagctgaatttcagtttggctccggcaggtacgttaatcgcataatttccatcaatatccgtaatagttccttccgtaccgcctatcacacttatattcacgccaatcaacggctcgcccgtagcatcaatcacttgccccttcactttcttctgagcctgtgccactacttgactgtcagttatattcgtatcggcccacgcctgtgagacaggacaaagtcccagcattaaccctaacgcaaacattgctgccttgtcaggtcgcgaattaaaaattaatcctcttcgtttcataaaattaaatttgaggtttaaaaatagtgtttatttcttgttttctaaaatttgatgaggcatcagtatgtctctccctagattctgattctttttccataagcacaaaggattatatattatataaataagattaaatacattttctgaaaaactcacgcatttcgcgacgacctataaatagatgattctctactgtacgacgactgagttgcaaggcttccgctatttcagtagatgtcttgtctccataacgacttaaggtgtagactatccgacgttgttcggggaagatagcaagccgacgttgttcagccgaagctaagtcatcggcaattattgcctcttctgtctcattggacgaagtaacggcaaaatcatacatataactgtctatctcctgtttcttataataccgacgaatataatcggttactatattacgtgcaatggcgaacaaaaaatacttcactgtatccggacggagcatctgtttatagtccagcagacgtacaaacacatcttgagccaaatcctcagcttcgtaacgatgagtgatacgataagtaatataggtaagaatcacctgatgatattctttataagaattagtgataatgttgtcggaagtgttagttattgtctccataatactatctttttcggttttaatcacgatgcaaatataaaggtgatttcggatatagtaaccggaaaatggagcatatcaatctcaacgaatcgagatagactcattttaatatataaccctaataatcaatacattaccctcaactttatagagtctcattttataaaatgagactctataagctaaatacaatatgttttcgctcagcttacactcctttactttcatcccttcattcttttatcttctctccttttatcatcttgtcgttttagtatctcattaaagctgtcactgaaatactagagataagtttcattgcattaatgacaaacttactttgtacttatagtaaagttactgttgatttagaataaactataaacgcaagctttgtttttataaatgaaaccttcgtttttataaatgaaagttgcgtttataaaaacaaagcttacgtttataatttaatccctatgaaaaacaactttgtaataggaacaagaaaagtttatgcaggatgaagcagaacttatctattaatagattacagattaaaaaagaggttcaccgaaatttattcctccttagcagttccacctatgctacggatatattcgttcggagtgactcccgtactctttttgaatgaccggaaaaaagaagcacgtgaactaaagccgcaaagttctgccaatgcagttaacgtatagcgggaatagtgactgtcctctaccattttcttaaattgagtgacgcggtattcattgataaagtcatagtaagactgattgagatactggttcaaaagatacgataatgaatgcgaagaagtatctaatgcggaagccagatcacccattttcaagtcggaattaatataaggcttttctttctcaacataagccaccagttttctatgaagctccacgcattcttcttcagttaacctattcgtcttatacttctcttcggtaacagtagacgactgttcaacaattgtttccgactgttccgtctcttgttctttccgggatatttcctccaccggtgttgaagctacctgaacaggagaagtgagtaaacggcgcatacgcttccatacataataacgtataaaggctataattcctatgattaataagacaaaaagcgcccatccccaccaaggtatcataggaagtaccgtcacttgacaggtagcttccgaatgttcatttcccggaagacggacacggaatgtataagtcccggaaggaagtccataataagaaacctcgttctgtgctgccaatagtttccagtctttatcaaccccttccaactgatattcatacagcaaggcagaaggcagtccgtaggcaaaatccgtaaaacagaaagtaagattattctgattatatttcaaagacgaaccggtaaaagaaacaccattagccaatatatctgtaaatactatcggacgcgccttaccacgtacttcatccacacgcttcgggtcaacgtaaatcaatcctttggtattgccgaaccatagtattcctttatcgtctttataggcagctccgttggtaaatgttggtccgggcactccatcgttgaaagtgaaagcgtcatactcttcgccttctttctttatacgcagcaaaccgtcattacagcctacccacaaccaaccttgattatcctctacaatcgccatcagagaattgtcgggaagcgtggaaaatacggactgattatagaagcggtccattgtcagcgtagacgtaaacaaactccctttctcacggataaaataaagattatgttcggaatcttcataaatcgttcgaactttgtctttattcacgaatccttcaggaaaaacattggaacgcaagttctgggaagccgggtcataaatacacataccggtttcagtggcaatccaccctttaccggtagaatcaaaactgacctcatacacgttgccctccggcagttgagaattggcactggtaaagtgctttatctgttttgtctgcccattatagttgaatagtccctgtgaggttcctatccagagatttccctttgtatccggtttcacacagaagatatgtcctttttgaaaaagctccgtatcactttgggaaaaatattttagcgataacgtctccggattcaataccatcatgccgcccccataggtacctatataatattctccttgatagaagctgattgtcagtatcaaatccgaggtcaggacaggttttacaaaactcttgaccattccggtagcctcatttatatagaacaagccgtcacgcgaaccgataactttctcctgccctctgcttatgaaagaacggatagagaggtttgccgaattaaacaaaggtggataggcatacgtacggaaaagaccgttctggtagagtgaataatccaagcctgcctgaaaatgccctacccaaacggcacccctgtcatctacgagtaaggagtagacagaattactgcgaatcccttccttatcacttacatcatggtagaaacgacgcgtcacctgctgttttttatgtgaaagaaaatggacgccattgccatcggtagctatatagacggtttcttttccatcactggaaatgtcggaaataacatcgcatcctaaagatatcgtatgagaaaacgtcttctttttcatatcaaaacgtactactccctggctcattgtccccaagtagagcgtttccccgatacgggtgaggcaacggaaataatcggcttcgggcacattttcctgaaaatgccaggaatcaatctttccgtctttcaatgaataggagaatagcccttgcaccgtagccagccatagtgcggttttatcttcattcagacaaatatccatgattctgttacaagcggccaacatattccggtctgtcaaaacttggagcaactgaccgtctttatgaatgaacaagcctttctccgtaccgatataaagaatatctccatcggatagtaacgtattgacggcaaaatctatcttttcgggaacaatcctctccaattggccacttgcacggttcaaccgccaaagtccgataccatttcccacccaaagttgcttattggcagtttccgtaatcgtatttacacgcttttttcttcccgactcaatgccccggaattcaaaatggcgcactttcacaccgtcaaaacgatcgaggcaattatctgtccctaaccatacaaaaccttcggaatctttataaatggcattgaccaacagtccggataatccgtcggacatgacgacattacggaatgtgtaattctgagcttgcagttccacaccacaaaccaaatatattaatataagaatcagatatttaatcgtgttcttcacttacaactgcttcctttcatattaaacatgtgacaaacatacataaaaatctccaaaagagcacattccttttcctaaaaaagtctccccttcgtatttgttgtatatgacaagcaaatacgaaggggaaagattatttactcaatgctatgaaagattttatttgcggctgttcaaataatcatttttatccgaacctttttcaaccaattcaatcatatagctataagtatatttcttgtcaagcaagcgatattcattgtgcggatacattccccaactattatctccgcctaatccgcgctgcttcaggtcaacgtgcaagaagatatttttttgcggaacaatgtcgatagtatgctgtaatttacgagtcagaccggggtcaagatcttccggtgagaaatgcaatgcggaaaatgagataggttgcaagcctgtaattttcactcccagtcctccgctatccaataaagtcagccaacgaacatctgttttatttcctgtttcctgcggacgtatataccaatagaattgattttctaccttatcctcatatcgtccgatgaaggcccccgaataacggtcgatatagttttcaaaaggccctctaccataataggtcaagttttcataaggttgatgcaattccatacgcataccaaaacggggaagttcgggaagtttcgttcctgtcaggtcgatactgcccgtcacaatgacagttccgttatcccgtaccaaatattccatcgtataaggcacttgaatatcgcttaagacccaatcaacccttacggataaccctttttcattattctcccctattgtcactttcttcacatagcggttgacatgggccgtccgccagacacctgccaaaacgggcattttattcccaaaatcattatctatcggagcacgccaaaaggctggttcgggatattgcctgataggttgcttgccatttatcatataatcaaacaagattccctttttcaaatcaatcttacctgaaacggcacctgattgaaaagacaaaatattgtcttttgtttcataagacagttttcccgaacaaggcggaagcgatgtgaagaaactacttttatttaattgcatttgctctctagctacttcatagccagcaggtactaaatcggtagcaacccgggtgtgcacatagagattaaggaaatactcatttccgtcttctggaataacggggagagataaacgtatctctttttcttcatgaggttttaaatcaacattgaaatcccccgtagatattttttctccgtttttgtatatttcccacatgaaagcatactcatccagattggtaaagtcataacggtttttaatagaaataattcctttccccaagtcttttgcgataaactgaatgtactgatacactttcttcacttcatacgcttgtggtttaggaataccattggcagaaatcaaaccgtcagttcccgtgtttagttcccctttcttatcttccagccatttataactacccatcttaccattatacgtccaataagtacgtccgtctcttggttcggtctttatcttaaatccctgatccataaaatcccagataaaaccgccctgcaagttagggctgtcataaataatatcccaaaggtctttaaaattgccattgctgtttccttgggcgtgagcatactcacacatgataaacggtcgctgtttgccggacttccgatattctgttattttccacatattgggatacatcggacagacaatatctgtattccaatcttcccaagcctgctcgaactgtacaaaacgaccggggtcatatttcttcaaacgtttatactcatcgtggaacacgattccattgccacattcgtttcctaatgaccatccgatgatacatggatgatttttatccctttcgaccattcgggtgatacggtcgacatgagcagcataccattcgggacgataagcaggatgcggaatggtatctttaaaataaggaaccgaacccattccatgagtttcaatattggcctcatccactacatagataccatattgatcacacaattgatagaataatggatgattgggataatgactggtacgaacagcgttcatgttcagttgtttaatcagtcgcaaatcattcattatgatttcgcgagtctgcgtatgtcccaagctgtcgttatgttcgtgacggttaacaccttttatataggtgggtacaccatttaccagtagccgtgtattcttaatctcaatgcgacggaatccgactttatgagccactaccgtctgttgcttgtcgtcattggctcgaagtgtcagaatacagtcgtaaagcgaagggtgttcagcgctccatttccgtacattgcgcacagtgccttcgaaagtaagtgtagtacttatatctgagatacaatatgctttctgcgcagataagacagtcttcccccctgcgtccttcaattcgagtgtaagtgtccctttttgtagagttgcattagcattgaacgaacgcaagtctacagtagcccgaaattgcccgtgtcggtaggtatcgtccagtcctgcatgcaaaaagaaatcccaaatggtcgtttggggataagcggtcagaaaaacatcgcgttcgataccgcttagacgccaaaaatcctggtcttccatatagctgccatcgtgccagcgatacacctgtacagcaagtaagttctctcctttttttaaatagtttgtcacattaaattctgccggagtcttggatgctttagtcatacccacctgctgtccgttcacatagatacgggcgtagccgctgatggaaccgaagtgcaacaacacttcacgcccctgccagttttgaggaaccgtaaatgtgcgccggtaagtccccacaggattatcaacgtcgatataaggtggattgggtgaaaacacatactgaatgttgcgaattatcggctcaccgaatccttggatttcccagttggaagggacagtaattgtatcccaatcattgtcggataaatctgtacaataaaaatcttttatgctttctgcgatagagggagcataaacaaatttccacgtaccattcaacgagtattgccaagacgatttttgtggattatcgttcacagcatcatctgtccgctcataaaggcgaaagtcagcgtgtggtttctctttgttccactcatatttggtgggattttcccactcgttgttttgcgcctttgccgtttgagataaaccaccaaaaagacaggaaaggaataataaggtagaaaataatctatttatcataagataaagggttgtgagggtttccattgagtaacgtcaaggagttaagaagcctaacctcttaactccttgaaatcagtaagaaaatctcaaaaagttattcttcagtatacaataatgttccaaaccccaaatcaccggcttcggcagtaccacgctcgccatatccttcggggcgttctttttcggcaaaagcttgcgaatatggagcattcatacctttcaccttggcataatggttgtaaaggagttcccatcccggacgggcacgccctttaccgtcggccgacaccttctcgtgccaaccgtatttggggtgatagtaaggttcgaaaggcatttccacatcttcggccgaagttaagttatacttagccgtatattcgcagaggtcgagaatgatgttgtcgttataggcaaaaaggtcgatacccatgttataggctgtacgacagaagtaagcgtgtaagcctacgttgagagtagcgtgcccctggtcgcgtcccatctcttggctctgtgccaaatgtctgcctttcacttttcccgcaggatcctcgtgcatgcctttcaccgaccattcgatacagcccataccttttccgtgatagaaaaattccaaggcttgtttaatcttggcatcgtcatcgttcagcacgccgatagaaagaatcgtgagcatggcgggcagatcccaactcatccagcccgaaatggctgaagaattaaagtggttatccaaaaaatcatcacagataggatagaaagttttatctatccatttcttgaagacttcaaaatcttcggttttccagccttcgtaatcccgcatcaattcagcgggagcagcaaactggtatccgataaatccggcggcaagcagacgatggctgtcgtcgggccatgttttataattcacccccttacaagtcttagcccatccgttcagaattttaacagctgccttggcataatcttcatctcccgaaattttccagcgtacagccaactgataagcggcaccggcatcgaaagcggccgtattgaagttgccaccttgcgagtgacgtacaatttcttcttgcgggtttgcgttgtagctcagttgggcaaatcggctttcgcacaatttttcccaaccgctaatccaaggttcggcacgttcgttcactttgcggcgtgcgcgttcaaagtcagcttcggtgttcaccagacaaggatgcttgatgatgtactcataattttcattggggttgatttcgcgttgccatggttcgggagttccattctcaaactcagcactacagccgatcagcaacacaaacgttatgctgctcacgaaggtataaatcagatttttcatacattcaattttcattttgttattcaatcagtttccagagaaagtagatgctattgtttaccactttcgttctttatcaaatctttcagttcttgttccgattcgaaagtctttatccaatccacataaatgctacctgtttcattggtttcataccatattttccaaaattgaagttccaccgtgtcgtacttcgtcaatgaggtaggcatatactgttggtttttgccaaggaatttcttcgtgaagtcggcgtagaatactttgtattcaccgcaatctaccacagtcatggcattttttcctttatcggtatcttcgccatatttaccggctacggtaataccgcttccgccccaaatgtctagataccactctatactcgttgatgcttcgaacacattttcgggaaatttcattttaaaggctaagatgggatagttggttacgttgaacccaaaaccgccggtgcgacaaatgcgaacagctttgtaagtcttatcttcaccggggaaaatacgaagtactccgtcattctccatccattcaaattcccggtgagtaaagtttccgaatggctgccagatattctcgacagtaaactggtcgttcattaaaccttcgctcacgctgacactcatcgtagctttgacaggtttaccatcaccatagtcggccaaagcggtaattactgcattgccataagccttcgccacgaaccggcctttttcgtcaatctctacaacatccggcttactgctttcccatgcgatgtacgaaagcgtagcatctatcggcgttacattcatctgtggagtgtaggtttcgcccaaagctagtttgtctgtttctttcacaaattccatactttcgatatagataatgggcttcaccttaatttcaaactctttcgtgaaatgtttgtcgtcggtagcggtaacttggatgcgtgcctttccttcagctatgcccttcacctcgcctttttcattgacggtggctttatcgggagttaggcttttccaaatcaacccggggtaagtggggtcggccggagtagtctgccaagtgaggggcaaagtcgaggttacaaacacttcgaggtcttcattagtgagattgatatcagtgatgtgaataatttcgtttactatcttcacattaatggtcgaagtgacagaatagcccacagccggcttggccgaaattaccgtactaccggccttcactgccgtgatgcgtccttcggcatctacggtagccacatcgggcacagtcgatttccataccacctctttgttgaaagcctcatcaggacctatagtatattttatcaaagtgtcagtgcctatcagcagaggcagttcggaggtcacttcaaggttgatttccttaacgagcactctctcttctaaaacaggggatacatcgtcatcgttgcacgaaacggtcatcatcaagccagctgtaatcagtgctgcaaacgcacccttttgaagtatatttttgtatgtcataattcgattactttataaatgaataatgaatggattattggttccaacccggattttgtttcaagttggagttcagtttgagctggtcggtgggcagcggcaataagtaatgcttttcatgccagttgcgtcctttctcgtggataatacaaccttcaccatctttctccttaaaggaagcatcaggccatctgttttcaaaatcggtacctttccacttcacaccggtgaggttcatcggcatttcgtcttcggccgttttccaacgcttcagatcatcaatgcggaaattctcatcgaaaaattcgatggtacgctcacgacgaatctctgtgcgcatatccaaattattcgccgtaacaaagtcgttagtcaagtcaggcatttcggggttgatgcgtttgcgtgtcaggttcaaactgatggctaagtcttcatccgatatttgtccatcgcgttcaaacacggcttcggcatagttcagcagtacctcggcatagcggatgatagggaaatcgtaagcttccataccggtaggcactccgtcgcgttcgctacaccacttgtggggaaagtaccccgtacccgtctgaggcatgaagttcctatgcgaggcattggctatttcggctgcattgccgctccaatcaatgcgtccgccgtttgtaccccagtaagtttgtccgggcaccataagctgattgttcatgcggttgtcgcgatttttatattcatcatccactttcgtgtaattccacgtttggggattgatgggcaacccattgctttgcagatacatattagccattttacgagtaacatacaaggcattacccaaacgcccttgggttatgttgaacccgatagaattgataacagggtcgtgacggcgggtaaagatatactctttattacctgttttattgatactggcagggttcgacttttcattttccaagataaagagatacttgtaggcctccgtacccaattcttgaggagcaaaaagttcgaatgctccgcccgccatcacatcatgagccgcctgtgctgcggtattgagcaaatcttttgtacgttcggtattttgaccgccattatggaatttctcccatgtaccttcatagagggctacacgcgaaagaaatgccaaagcggcttcgcaggagaggcggccttcatcgctgctgctgatagccttatcgacgggtaatagtttagcggcttctttcaagtcgtcaatgatgaagtcagctacctcggtacgcggattacgggccttctgcatctcaggcgagtcgatgtcgagcggtgtgcgggtaatgataagatcaccataagcctgcaacaactcaaagtaacaataagcacggaagaaacgggcttcccccaccgaaatggcaatgtcggcttgttgttcatacgtatcggcttgttgcaataaagtattggtttgacgaatacgattgtaattgtcggtataatgcttgtctgacgacggaatactgttcgttccgttactatagatgttcaccgtgctaccggcaaacaagtccgagcgaatatcagcgtgctgactgtcgtcgagccatcgaaagtcggccgaccagctgtagaactgggtggcaaaaagtttgaagtgttcgggcgacttccaatagttggtatccgccaattgcgtcttgggttcaaggtctaaacacgactgcatggtcatggcgcaaatgattcctaaaatatatgctatttttttcattgttatcttcaatattaagaataaaaattagaatatggcattcacaccgaaagtcacggtgcggttaaacggatagcgttgcttgttttccactttgcgggtggcttcgggatcccaaccatcggtgatatacgatttttcccacaagtcggcgcccgatacataaatacgcaggttgctgataaaaccgctcttattcatccatgcctttggcaatgtgtaacctagtacaatctctttgagacgcaggtaagctccgttatcggccgaccaggtagaaggaatgtagttgtagttattgatgtcattactgtttgaataagtagggaaatggttattgggagtttcaggactccatacattacctaccgactggttggtagtgttcagccaaatagctttgaaaggcactttccaagagtcgatttcacgataaatggtacgcttgcccacaccttggaacacggtattgaaatcaaatcctttccactcgcatccgaaattaaacgagaacgaatattttgggtcgtcggaaccaagaaatacaaggtcgtcttgtgtcagtttaccgtctttgttcacatcttcatacatgtggtcgcccaaacgcaagttggcaggtagagcgatagagttgctgcccacatatttgtccacataatagtccagttggtcttggttttgtaccttgcccacatagcggtaaccaaataccgagttgagtgggtagccattcacagcttcgttataacctgcgctcaccacgatgttacctccatcgactagtttgttggtcatataggttaacgtaccgccaacgtggtagttgaaaccgcctatcttgtcacgccaagtcaagctggcatcgtaaccattggcctcaaacttaccgctattagtactgggagcagttccacccaatacaccggggtgcagacgcgaaaccagcatattgtcgtttttctttttaaagacctcgaacgtacctgtaaggcgattgttgaggaatccgaagtcaatccccaagttatagttgtagatacgttcccaagtacgcatggtgctcaccagtccggcagattccacataggttcctttcgagttgcccaacaaagcgccactgttcgatttgtaattgtaaagttggatgccgtcatagcgtccaataccattttgattacctacctcaccatatgaggcacgtagtttcagttcattcacatagtcacgcaagttctccatgaatttctcttcagtgatacgccatccagctgatgcgccccaaaagaagttccagcggttcttgggcaaaaatttcgaagaaccgtcgtagcgagcattcacttcaaccatatatctcgacttgtaattataattcaagcgaccgaaataagagagaatggcttcctcccaacggtctaccttgtctatgtaaatttgtcctttaccgttaagcgattcgattgccgcttctacgtccattgctttggtgccgctataatcgtaagcggcataatcgtattgcacacctcccataagcgatatgtcatgaacctcatcaaataatttcttataagtgaggaaagctgatgccgtgtaattgtcggtacgcgcagaacttttagtatacgatgatttttcttttgcgggatagggagagttctcattttgaatcggtgtaccgtcgtattgataccaatcaatcgaaagatattgttcgtcacgggccgcattgttcgttgagtatcccaaagttccctgaaaatcaagaccatccaaaatgttcactttcaaaatctcgttcacattcattgtggtcaccacaagtttgttgtcaccacccaattcggccgaccagttaggggtatgaatgcctccccacgcatacggtttgccatcaatagtcgaaaccggtagccctggctgtggtatgctactgcctaatatactaccaatctgtgtaggagccacctgatgctgacgactagctgacatgttggtttccaagctgatacggttgtttatcttgaaactgttgaataaacgtacgttatagcgttcgttcgagttgttcccccattgcaacgtcccctggtcgttcaaataacccaacgaaagtcggtaggtcgatttttccgaacctccgcttacgctgaggttatgctgggtagaagtggcatttccccaaagcacatcagtccagttcatatcgtgaaacacaaaatcggccacaccacggaatcctcccggaatgggatcttcatcggggttgtttccaccatgcagattaatccaactccccttcatcgctttagccaaacgggcataacgtacccagttgtcatcttcgccatagccgtcattcaaacgggcttggagcacaccgtccgtccattcgtccatgctcatcatgcggggctgtaaacccacaattttacgtgtaaccgaaccactatattccactttggttttgccggcatcgggacgtttggtagttaccaaaatcacaccacccgctgcttttgcgccataaatagcagccgaagcatctttcagaaagttaatggtttcgatgtcatcggcattgagttgagccatctcgctcacaccactggctggtacaccgtcaataatcaagagaggttctaccttgtttttcgagacagagccacgaattgagacaccccatccttcttcaccaggagcagccgacgatcgggtgatgcgtaagcccggaacctgaccttgcatagccgaaagcggattgggcaccgtacctttgtctttaaaaagtttttggtcgaccactgttaccgagcctgtcaacgattcttttttctgagtaccataacctaccacgacaacctcatccagcacctctgtatcttcgtgcatgataattttagccagattcgtcccttttacagaaacttccaacgtcttataaccaataaaagaaatcaccaacgtaccacctgatacattattcaaagtaaagtttccatccatatccgttatcgtaccattggtagtgcctttcaccttgacattggcaccaataacaggttctccataggaatccacgattttacctttgattgtcccagtctgcgaaacagcctgtacttctcccacataggcaaataccgcctgcggagcacctgttacaagggcagaggccatcaccgtagagaatagaaatcttctcgatgagaatctgaagagattttttttcatatacataaaatttaaaactaacatttatactatttattctaatattagatacactgttggatatactcacggatttctttccgactgataaacaagtggttttccaccgtacgggaagaaattcccaattgggcggcaatatcagccgaggatttattttcgaaacgactcatgatataaatcttccgacgttgttcaggaagctgattggcgcgctcccattcgcatgtcaatagattattggcaatgatctgactctccacttcattggtacaagtaggaatccggtcgaaaagataggaagttacttcttgagctttgtaaaaacgacgcaaatagtccgttactagattccggcaaatcgcgaatataaaatgtttcactgtttccggacgcaatatctgcttatagtccatcaaacgcaaaaagacatcttgtgacagatcttttgcttcttcgtccttacctattttataatagatataaagataaacggaatgatgataactcttataagagtcagcaaccagttgagtggatttcatgtttatattttccattgcttagatttttgtttatcattacgctggcaaatataaatggtaaatacggaaaagaaacaataaaaaagggcggatagatttcatcctattggaaggaaaacagaagtcgtaatacctactggtaatcaatcaattatacaatcacaaactggagtctcaaattattatatgagactccgacaatcaatcttcattagttcgtcctatactttggacgtattcattcggggttattccagttgtctttttaaaatagcggaaaaaggaagtgcgagaactaaaaccacacagttcagctaaagcacttaaggtatattttgaatattcatcctcattaagtaaccgtttaaactcagctatgcggtaatcattcagataatcataataattcttgttcaagaactgattaaacacgtaggacaatgtatatggagagacgttcagcactgacgccaaatccgcaatctttaaatcagggttaacatacagtcttttttcctgcatcaacatatccagttcgtctgccagccgatgacattcttccatactcacattgctctttctgtatttttcttcaattatcggtttctcggtttctatgacgtccgccgcaagagccggagagttcttttttctccggtaataagcatagcttaagcatattattgcaatcaataatagaattgttccccataaggtcgcgttaaaagaggaagcaatagtcactgataaacagatttctgaaccgggctcaccaatccgacggattttgaattgatatttcccagaagacaagtcataataggtcagttcggatttaccacctaacaactgccaatcatcatccatcccttccattttatattcataagacatatatgcaggatcggaataggtaaatccggagaaacagatagtcagattcttgtgcgacggttccaaagagactttatagagatgctgttctctctgtatagcaggatgataaggttctttaccattcacatatacatctgtgatagccaggggataactattttcttcatctatatcacgtaaatccctggtcaaataaatcaatcctttggaattgccaaaccagattgttcccgaagcatctataacaggacaacaggtaataaaaacagaactcggtaatccatccacaaaagtataaggaacaattgtactttttttatcataacggtacaagcccagattcgtaccaatccacagccacccttcacggtcttcgatcataaacatggcgtctttcccttccaaaagagtacctggctggagtcttcgaaaatgagtcattgacaaatcggaaataaaaatggggcctttatccggaaggaaatagagttcgtgggaagaatcttcatatactgttctgattttctctttatgtataaagccttcggggaatacatctgattttatgctacgagtggaaggatcccagatacataaaccggtagccgtacaaatccagccctttcctgtagaatcaaagcatatatcaagcacattcccttccgggagtttggagttcgaactggtatagtgattgagttgttcgccatctttatactgatacaaacccattgaagtggcaatccacagacaaccgtcattgtccgacttgatgcagaaaacatgtcctttcacaaaaggagtctccgaaggttcaaaatcacggatagttaatgtagaagaatccagtatatacatgccaccaccatacgtaccgatataatactttccctgaaacgggtaaatacacattatcatattagagcgtaattgaggtgacttgaaactcctaaaacgccgattcttctcatcaacatagaacaaaccattgcgggaacctatcaatctttcattctcattgatagctatggcccgtaccggtatgtcttttgagtcaaaataaggagaataagaataggtagagaaaagcccgctctgatacagtgtataatcaagtcccaactgatagaatccaacccatatcaatccttctctgtccaccagcaatgaatagactgagttagagcggattccgccattagtaccgggttcatagcagaaagatttcataaccttattttccgtgacagatacaaaatgtactccatttccgtctgttccaacataaagtatatcttttccgtcacccgacaaagaggaaattacattgcatcccaaatcaatccaattatccctgaacttccctgtcgatatatcgaaaacaaccactccatgttccattgttcctaaatagagcctggaaccaattcgtgccattttctgataagtataatcctgtctatcattgtcaccgtatggacataaagttatttttcgggtagacagattcattgaatatagtttggagcgggtcagaatccataatgtatctttttctcccatattcaaatcgactatgaaattatccgatgaccacatatccgcattgatagtaatctgcttcatttcattatttttgcagacaaacaatcctttttcgctgccaatatataaggttccctgcgcatcggtcaataaagaacgaactccgaattttatcacttcagcaacaaacggttctaatttaccggattctttatttatccgccaaaggcccatatcatttcccacccaaatctgattgccttgcgtttctgcaataacattcacccatttcagtttctcatcatctccgaatatcggataatgcttgaaacggaagccatcaaaacattcaactgacgtagctgttccaatccaaagataacctacggagtctttatacaaggcactgaccgttaaatcagataatccatttgtttctgacagaccgcgaaaggaataagaaatcggataggcagacagaaaaaaagaaataaatataaggcttgttatatgtcgtatcagattattcataggattcatatttgataaaacaatgcaaacctacataaaatatccctaattttatgtaggtttatacaaaaacaaaacacattcctcattaaaaatgagtgttaatctaccagctttatactcaattgggattgtttataaacaacaggaattctcttattattaacctctactcttacaggctttttcttactcctgaaactggcatttatcttcggttgtccgtctatccaaagattgagtttcttatcttcttccttttgaatgacaaacaacttggccaaagaagaaaaataggtttccttatcacgtcttaatgcacttccatagcagataaagaaatctgtggcgtctttagcttccgttccttcaggataagagactgcaaacatataggcatctgtcatccagccgtccggcataatccaggagttgctgtgcatcagcctgccgtctgctaattgattaatataaagatcggtcactttacctttgtggcggatacgaagaccaatccagtcctgcccttcccgccgttccatttgcggcagatctttttcatcaggagtatccttcaaaataatagctgtcagcccttttacacggttcacttctgcgggcaaatggaatgaataataagtttcggtacctttcagatcttcagttggagcctgtatttcttcccaatacaaatcttccggataatcgtgcacaaaatcggacttagcaagcaaacggggataaagaggacgaatcacaacggaagaattaccattcgtcacattcacgtcaactcccgactttttataagtcccgttggtatgccacagccattcaaaacgaccgaccttatgcgtctttaaatcatcaatcatgtaaatcacatcatccatccaaagaaaatgacggaaattacggctgaaattgtttgaaacgggccccgttccattagccaggacatatttcacatttcccgcatccaaaagatgatataaatatccccgcaaagtagaaccgctatattgctgctcacggggttgtccctcgccattgaacagtactacattatgcgcctggctttgaaagaaataatttcgataagcaggattaggataccagcaatttccaccgtcttttataatgtccactcctttgtgaaatataataaaggaattggcgtccgcatgagagtgattccatgtatgaccgctttttacagccagcatcgtagcatccttttcccacgaattgcgcatcgtagcccagccaaaatcagaaaataattgagaagtcggtaattgaggtatagcgggcgccttactcaaatcgggagtataaagaaagcccatcggacgattcagaaaatatccgtcacgatgttgtccttgttccacttgactgatataccacaaaatagttggatctttcatccccaatgcatacaatagcatcatactggattctgccgatacatttttatggctatctccaaaattcaaactatgtagcatacctgtacgcggatagcagacttgtgagaagtaactcggcaattttgctaattgaggaatattacccggattctgtccgggatgagtatttatccaagctatcctgaacaacaaagcttcctgaataccaaagttggcgtaattcagactttcatacattccgccggcctcatcaaaactctttgctttctgctgcaatacatcacctgcaaagtcgaaccattcgggaagagattcgtgaagttgctccacccattccctggcttcggggatttcgttttgaaggctcattgccaataatcccccttggcaaacgcaggaagtccaccagttatgccccattgaattcaatgagtggatacgggtcggttccaacagccagtcacctaatgcaggttccagagcaagtcgttttaagccttgagcaatctctttcttttccgaagatgaaagaatatcataggctgcatcataacccatagcgcacaggaaacttttatgtgccaaccccagatgtgagcgccacaccgggatacgtgccagcatttccttatctccccatgtttcggctttcacagctttcagcagtatctcttttattgaatttacatagcttttgtcttttgtcatcagataagccaatgccagataatccagtttgttgaagtcattcttttgtaaagctgcatcggcagtctgtttaatgctttcccaggcttcctgcaatttcggttcattctgcatacgctgcttcacttgctgaatgcgttgcggagtatataagagtgaaggatgatttattttctgcgcttgtatgtatgatgacgaaagacacaaaaaacagatgatagcaataatagtttgtttcataatatttggcttattctatatattgactacttaacaatctccgaaaccgtccgcgaaatcacaggactgccatagaacgaagaaaaaccgtcttccttagcagaagaacctactacatgggcgataaagaagccgtaaacactatcacgtttatttatccaggggtaagcgccagcccaacccggagaactgatttgataggcttcgcccgtcttcttatctattaattcacgccattcgcccaatccatagataccggtatgcgactgtcccagtgctatttccgtgtattccccgggagaaacaagggcatcctttacttgattagcctgcatttcctttactgtctccgcagtcagtatccgttttccttcatacgttccttcatggtaaatcatagataggaaatgaatataatcgttcaaggtagtacacagaccaccacctaacatcggggcatgtccgccatcagtatttatcggagtaaaatgagaattcttcatttccaatggttgcgccaatagttcttgaaagagagtttcaaactctttccccattgccgcttccgccattcttccggcaatctgcatggcaagccccccatactggaaccggcttcccggagtaaaaaccgtatctaacggcaatatctcaataatggcagaatccaaatgattgtaattatctacacgcggttcaggaagatagggacgcactccggaagtatgagataacaattgtcgcaaaaggatttttcctttggcatctcccttaaattccggcaaccacttttccacagggtcatcccagtccaaactggtactatccacaaccgctccgataacagcagccgccacccattttccggcagaagctacgtatacttttgtatcaggagtatagctaccatagttcttctgaaaaatgacagaatcattctttactacacagatagaagcacctggatagtactctttactcacccagccttgaataacagaatctaataaagagaagttataacgactcccttgtacggatgatacattgcaggaacctgcaataaaacagatacttataaaaattacgattaataatcttcccttcattttcgttatctattaacttcgtattaaacacaaattacacgaactacgctgttgtttgatgcaattatatttgatgcaattataattataaaaccgcgtaattcgtgtaattcgttcttaaaactttctatttcgactgcaaatcccaatataccacataacgctgatgatgcaaatcataaagcggacgaatcacatctccttgttctgttgtaaatttcaggtcttttcctgtacgctgcaaagtacgttccggatgtttcatatctactttcaataaggtacgcaaatcggcaggcacatggaaattataagtataataatcattataaagagcaggattagagaaaggtgcgggagcctgcataccttccgtaccccgttctccggcaagcactaacgggccatacaataaagctaccttattcggattatcgggagtggcttccaatgcaatctgcatcgggtaagtagccgagatacggtcattatctttccagtcacgggtgatagcgatgtaagaacccggcttttgttttactgctacttttttaccgttcacaagaacttccgcttttttactccatgaaggatatcttagataaacagtagtacgaaccggtttttcggcacgaatagtaaaccgggtcgtttcctctttcggaaattccgtttcctggagaagggttaaccctttttctttccaggtgacttgggaaggaataaacagatttacgtagattccctggttgttgtggtagtagatagcttctccatatttagcatgattttcgaatccactgccgacacaacaccagaaagagttctctttggtactatacagtttatgtgaacccgaaagtaagggtaagaaataagtgaccattcctgtttccggatcttgctgtcccaggatatgattatatagtgccctttcataataatcggcaatagatgaatcgcccgtccaacagaaaagatgacggctaagcttcaacatattataagtacagcaggtttctccggtatagccggtcaaatgtttagagaatttcttcggggcgaaaaaatgctccttatcactactgcatcccggagcaaaagtatggtggtcaatcatggtatgccagaagaattccgagagctttttgctggtctcattctctgtcagttcatagttacgcgcttcggctatgactttcgggataaacgtattcgtatgcttggttcccaaatcgtcccgaagttctttcaacgggtcaattacatcattatggtagaaatattcagccaaccaacggtaccgttcatctcctgtgatagcatacaaattgtagaatgattcattgacacctccaaactcattacgtatcatgagtttgcgggtttcttcactaagtggtttcagtttgttataagcccagtcgcccattttggtcactgttttcaaagcctgctgattatccgcatacagatattggtctatcagaccggaataaagcttatgcaaggtgtaccaaggtgcccaaacactctttccccggatattacgatttatcagttcttcgggaaaagcacttaaatatccgcctttcaaagcgttctgaacttcggtcagcccgttgacaaggctatcccctttcaacttgaaaatctcacttccggtagcagcatacatcaaagcgtaagccgaaagcagatgtccggtagtatgtccgcgaagctcacagtccaaggattcccagccaccaagttttttcactgtcatataaccgccttcacgaccagcaaagactccggcatttgtccggaaactatgcaacaggcgacttacgtcgatagaggtcatccatgcggaatcccgcaacatattgtcacgaaaacgactcggtaataaacggacgtctttcaaatcaaaactttctacccgaacaggagccactgtctcttttttcattttcccctggtgctgtccggggtacacagattgagccgacgatatagccgatactgccaataatgcgattgcaactaaagatttcttattcataatcatttttaatatccttatttattattggatacgaatagactccgcctattactcaatgcaaaaatacgaatttaatatttcatggataaatgaaaaaactccgttctaccggttcggcagtctgtacttctcctgccaatccatattgccatgccaccacagtcactttcaacgggaacttactgcgtgggggaattcgagtaaataccaacttgtttccctctatttctgccggcccttctttcacgtagtaatatacgggtaacccgcaatcggaagttgcatgtaaagagatagtttccgtgccttgcttcacatcgtcaagacccgggaaaagaatatgctgacgtttaccttccgtattgcgatagggaatccggaaactaagttcctgaactgtgcttttatagtgcttgtcaccgtcattaccggctagaaggcaaatatctcccgtacggcgctgattgtacattcccatacggtagaaacggacagtaaaagtagtgtcgttcactttctgaaccgggccacagatacgggttatttcaggagaagtgagcgaatgttcgtcagaaattgcagtatgcaagctatccgtatatacagctttcagatgaaaagtcaatccgtctttttccggcaggaagcgggcggcaactttcacatgggatttgggattatatgtgagtaattgccccttttgtacaaaacctaaatattgtggtttcttccctctctcccggcgatagcgttcttccgtcatttcagccatttccttatcgaaataccagaatgcatcgtgcgagtctcctttatactctttataaggagcagcttttgcacgtttcttctgattcggatgccacctttcggcaagccagccattctgcggattcagtttcttcaattccacaggcttattcaaatcatacgttgcaggcatacgatattccagtgctttctttaagaacaacgcaatataaccagcggtgcggtcggctatatcgaaatgtcctcgtcctgtgtcgcaaaggaaagagacgcaacttttaggatacatcatacggaatgccaaagccggatttacacggtcttcccaccattcgtattcgccttcaatcatcaatccagggatgccgtcaatcgtacgttttccccactccatattgtcacgaccatatccggtaaggttagtgcgtggcgcatctccatgcaaagagataatggctaatgtgcggtcgggattccaggccgcaaagttccacggataggtagccattgccgaatgtccgaacggaacaatcggagcatatttcaattcgttatatccgctaacagaagcaaagtcatccagcatttgttcaaatgccttctggcttccggcagttatgtcccacttctgatcccatcccggagtaatccatatcagtgccagacctatttctgacattttctcccgaaacaaggcgttctcaaacagagtttcttccgtcatattatgagtacctatcataaccccttttacttggacacaatcagacggtatccataaaaaagcctgcggatggtcattcgtctcgttggaaacaatacccgaaatctgcacggaccactgccattcggcagctatgctacttggcaataaactgacagccaatattacaaatataaaaaaacgaagtagtttcatgtttaattcatttatcattctcccatataatacgcagtaatgactacatatactcaaccgaaaaatataaaaaaactattattatcggaagcctttcaccggctattccacaaaaacgttgtatctttattctcaattaagaaaggagttatatggatttacgtacagcaaatgtcacaagatatattcttgccctgcgggaagggggctcattaccggctttggccgaagctgacgatgaatttaagtatgtggtaaaattcagaggggcaggacacgggacgaaagcgctgattgccgaactgattggcggggaaattgcccgtacgttggggttcagagtaccggagattgtttttctgaacctggacgaggctttcggacggacggaagcggacgaagaaatacaggatttgcttcaatggagccgcgggttgaatctggggctgcattttctgtcgggagcattaacgttcgaccccgttgtgcataaagtggacggtaagacagcctcgcaaattgtgtggctggatgccttattgaccaatgtagaccgtactatcaaaaatacgaatatgctgatgtggcataaggaactgtggttgattgaccatggagcttccctctattttcaccattcatggactacttggcaaaagcatgcgcttagtccgttcgtgcagataaaagaccatgtgctgttgccgtttgctgataaattggaagaggtggatgctgagttcaagcaactgctgacttctgataaaatccgggaaatagtcaatgcagttcccgacgactggctgaactggacagacggacaggaaactccgcaagacctgagagatatttatattccttaattccgcaacactattacaaatataactttttaagtacctgagcaacaaaaagttgctcaggaatttgccatgtcagatttttcacctatcttagtgttgcaaatcaaaatatgtatcaaacccgacagacatggcaaaggtagcaattaaatccgagaaactcactccttttggaggaatattttcaataatggagcaatttgactccagactctcatctgtaatcgactcaaccctcggtatgagatgcaggctgtatggttatcaatacagcgaaatcatccgttcgcttatgagcgtttatttttgtggcggctcatgcatcgaggatgtcaccactcatctgatgtaccacctttcgcttcatccgacacttcgcacatgcagtgccgacacgattcttagagccataaaggaactgacccaggataacatttcctacacatccgacactggcaagacctacgacttcaacacggcagacaagctgaatacactgctcctcaattgcctattgtccacagggcagctgaaagagggcgaggggtatgacgttgacttcgaccaccagttcatagaggctgagaagtttgatgcgaagcctacatacaagaagttccttggttatcgccctggcgtggcggttattggcaacttgattgtcggcattgagaacagcgacggcaacacaaatgtccgtttccaccagaaggacacgctgaagaggttctttgaaaggtttgaacaaaacaagcttattatcaaccgtttcagagctgattgcggctcgtgttctgaagagatagtggaagagattgctaaacactgcaagaccttctatatccgtgctaaccgatgcagttcgctctacaatgacatctttgccctcagaggttggaagaaagtggaattgggcggcattgagtttgagctggcctccattctcatcgagaaatggaaagggaaggcataccgtcttgtgattcaaagacagaagcggatagacggcgaactcgacctgtgggaaggagaatacacctaccgctgcatccttacaaatgactacgagtcttccgagaaagagattgtcgaattctataacctccgtggagggaaggaacgcatcttcgatgatatgaataacggattcggctggaacaggcttccaaaatcctttatgggagaaaacacggtgtttcttctgcttatggcactcatacgcaacttctataaattcatcatggcgaggcttgacgtgaagaggttcggactcaaagcaacaagccgcatcaagacgtttgtctttaagttcatctctgtgccagccaaatgggtcaggacatcaaggaagtatgtgctgaatatctattcatgcaacaatgcttatgccaatgtgttccagaatgactttggataacaccgacaacttatagtcgtgattttgcgtattgcctcaagtcgcatggtggggtaaggggcatttatatgtctttatggtgacattcgatgcactgtgccccctttttactaacgatgcagattcttttcgcttctgtatcatattaggcgcgtagttgcggatttgaggatattcaatttttagaagaaaggataaaccattccgaaacatttgtaaatgaagcgcaaaatgcaagaaaggcacttatatgaatacgcagtcatccgtttcgtccccagggttgaacgtgaggaatttattaatgtaggtattgtactgttttccaaacggtgcaagtatcttaaatccctttatacaataaatgaaaataaattgaaactgttttcttccgaattggacgttagttgtttgaaagagggattacaggtctttgataagatatgtctggggaatgaggaagggggagcgatagcgaatatggatattcccgacagattccgctggctgactgcggtgaaaagttcctgcatacaggtatcccgtccgcatccgggattttccactgacttggacaggactttggaaaggctgttcgaagagctcgtattataataataggaggctgtttaacaagttatataatgcctaccacctccccctaggggtactcctccttccagaaggaggagacttttaaatactatcgacttgttagacagcctttgaacatacataaacctatcatattagtatatcaggtttccagcctataaattaatttcatccccgtaatccctcttatgtttctttgcagacaaatgtaaacaaaaagaagatacatctttatccaccacaagattgttctattaattaataagccttgtttccgtagaagcctttatttattcataaggcttcttttacttgatttaactccatataccacgaatccggagaacaaaatacgctgaaaataagtatatatatggaaggccgaagcgaagacagagttatccgtaaaaatggtagcaaaacccgtaatctatataaatacaaattactttttactgaataactttgcatacagaaaaaaggtagtaataatattagaatatgcttttaatttaagatagcttgattatggaaaaggtaaaattgaacaatggcattgaaatgcctattttgggttatggtgtttatcaggttactcctgaagagtgtgaacgttgcgtatcggatgcaatcagtgtaggataccgttctattgatacggcacaagcctatcataatgaggaaggtgtaggaaatgcaatcagcaaatgcggtgtgccacgtgacgaactgttcatcactacaaaagtgtggatttcaaatgccggttacgaaaaggctaaagcttctattgatgagtcgctgcgcaagttaaagagcgattatattgacttattgctcattcatcaaccattcggtgattattacggaacgtaccgggctatggaagaagcatacaaggccggaaaagttcatgctatcggcgtcagcaacttttatcccgaccgttttgtagacttggcggaattctgtgaaatcactcctgccgtcaaccaagtggagacgcacgttttcaatcaacagataaagttacaggaagtaatgaaggaatatgggactaagattatgtcatgggggccgtttgccgaaggaaggaacgacttctttactaatgcaactcttcaggaaatcggtaaagagtacggcaaatcagtggcacagattgcactgcgttatctgattcaacgcgatatcatagttattcctaagtctacccataaggaacgtatgattgagaatttcaatgtattcgactttgcgttaacaccggacgatatggctgctattgccgagcttgatacagcccaaaccttattcttctcccactatgacccggaaatggtaaagtggctgattaattatagtaaataacagttcaccataattttctttttcaggcacggattacacagattacactattgctttatgttatcataattcataaaaccgtggaatccatgtaatccgtgccttaaagggataattattaacttgcttacttaagcggagtaaaatgcaacgcagctccgccactcgccttcaacttcaagacaagtttgtcgcctgcctttattttcttatgagtactgcgtactttcgtccgtgtattcagcttgtcgtcatcttcatacagatgaagcagatacttttttccctgttccagaaaatcagtagtcaatgtgacagtgcgggcttccgtgtttgtcattgctccaacaaaccagtcatttcccgaacgacgtgcctgaacgatatactcaccaatttctccgtcaagcgcacggctatcgtcccatacactcggaatggctttccaaaattcgagttcttcttctcctttataaaattccggtcggtcataccagaacataaattgcaaagggctgtaatacactgctgccatcgccaattgatgtgctttcgtattcttcactctgccattaaaataacacagtgtataatccgcagcgcctgccaggaaacgtgtatacggaagaatcgtgttatgtaaagcatccggcatctcttcattgccaccgatgccttcctgtgtcatcaagttaggataagtacggctgaaacctgtcggacgatattcatcgtgaatatccaccatcagaccgtattctccacatttgcgaactgcatcatgcagccaggtactccaacgctgattaccaatctgtacaaaaccgaacttgatacctttcaatccccacttcttatataaaggtaataaagtatccaattgctgcaccaatgcacgctgattgacgtataccataagtccgattcccttcgattcggcatactggcacaaagcaggtatatcaaggtctttatccggagaaacagtagtagcgtccgaactcatcttcatttccggcccataccagcctgcatccatatgcacatactgaataccgcgctctgccgcaaagtcaatagccgctttcaccctttcttgcttcaagtcgcccgaacggaatacttttcccggtttaatccaggaagtatcagccagtttgcaagccggattcagattcaagacaatatcattgttgttaatcaaatcgaccggacgttcgccaaccatgataacgcgccacggagtgctataaggagaaattatatcgacactgctatacaggcttgtctccaaagtggaaggtttgtctgccgacaaacggaatttgccacgagcataatccaccatttccgcttccaacagggcaactgataacccgtcgggcagtttcaatgtcaaaggacgttcactttcttcttttccccaaccttccagcggacgaagtgcataaggcccttgtgcccaacgctcataataagccattgttccttgaggcattgtgaaactggtttgctcgcctatgatatgcaggaaaagcccatttgttgtttccgggaaatgatagcggaaagcgactccttcattataggcacgcactatgatattcataaagtaattcttacgcttatcatagccaccttcctgtgctccgtctccttcgcctttcttgaatttcagggtcatctcattataacagtcacgaatctcggcacgttccccatatacaggtttccatgtttcatccgctttccgtcgctctgttcccgtcaacttcagattctcacaccagaaatgacaagtgtcattcggaacacccagtgccgactcgaacaactgattttcaatcaggacacccaatttactttcttcaattaccggacggttcttgtaagtcaaggtgtaatacatttgtgcattatcctctcccaccgcacgctgatagaaggtaaaacgatatgctccgtcgggagatgtcagttcctggcgggtttctgtcattacatcctgcgctttcaacaatgccggtaccaccagcaataaaagcaaaattcttttcttcattctatttacgttcatgtttattcttctttcctattagatacgaacgagaaggaaattatactcaacaccaaatatacgataaaaaataaaatataatttttagttccgctgtttaatagtatctttactatcttcgaaaatgagaatccggggttacccatgcgtgtagaccacggacgtatgctggatctggcacaggtggaaggaatgatggctgtaatagatgatgagaacgcacgtcagatgaagttttagccagtaatagcaggtacaacgcaaccgataagcactagcatatcttatgaaaagccataagtcctataacaacaaccatatagatcacttatgtttatctcctttgttctttaatagctaactattgccagcctgtccgttaacccgtgttagctgataagcttaccaaggttaacagacaagctaacaaaggtaagcctacatatttccttattactttatgcattaatcccgtatgcttttagtaacaaatgtataggaataacacaatggatgacagtgaaggagcgagggtaaaaacgtcataaactttttttcgtatcactttatatgcatcttatccacaaactctctcttgtttatattcagctcatccggtgaagtcacccgcttgccattcaatacgatattttcaaacaagatatcctccacttttctatctttatcgtagccttcaaacaaagaaggattaacaaactttcccgtgcaggaaatattacgaaagacgatgttcctgacacctctgccgggtcccgtgttatattttcggttatacatcacccgaagatgaaatagctgcccttcctgaatatgttccacacgaatatcctcaaaagttatattctgcgcaagattatggtcgcccacattgatagccatacaaccttgataatcacggtcatcttcatcatgttccaaaatatctatgttcttaaatagcatatcttccaaaacttcatctcccgtttcggtgttcccgtgcgtacctatattgataggatgcgcaatatccgcccatagagtagaattcagaacacgaacattacgacaatctccataaaaattccaacgatgcgtataaagagctatacaatcatccgaattacggagaaatacatcatcaatcgtcacatccgagcaagacataaaatccagtccgtcactccacccctgatagctaaatgatttcaagttctttatggtgattccggtagactgtccgccggaaactgtataatgtcgtgaattaatgaccgtaatcccctcaatcagtacatttttggaataagcgattgatattccctgttgaggttcaagcaacatcccatgccccagaattttcacattctctacactgtcgcaattcaaacgccctttcagcactgcgccaccttcgagataaaccgttgtattggaagggatacggaaacacttaccggtcgtatcggtaggctcatgtattcctgattcgaagtacatcacattcggatcgttcttatccggtacattctcaatgataggattggcaaacacgtgcaggttactcaaacggtcaccattaaactcgactgacagtttctgcggtttgtctatcgtaaataaaagaaagttcccgtctatctccggttgaatgcctttagccaaaggacgcactactgccgaacggatctcgccattgttcttttgcacaagaacttccacctttccggagaaatcgaattgaaccattgtggcatcggacttcgtatccatatccacctttacattatattcatacaggtctacccactccttttttcccacctgtcgcacttttacagtataatcatcgttgtgacgggcatagtagatgcctgtcggaacaggataagtaatgattttcgcttgtacgcccaaacctgtcaaagcaagcaaaaatgtgattgttattcttcccaatttattcatttccaatttttattagatactaatgtggattccgataccgttccgttttttatcttttttccttcaataacaaccgtacagggagcggaagaaagaatataccatttcccctgtttcttttcaagcaatacattagcaacagtatcggcctgaatccttattcctggtgcaaccaacaaggtgccgtttcccaggaataaagtccggtttccatcatattcattgctgataaccgcataatccgcttttactttcatcccctgataagtagcggtctgcgctgcatcagaaagagagaatatgtggtcgatgcgtccgttcttactttttacacaaattcctgcaaagtcattcaaagcagtttcctccacatcgaagtaagaaaccgactcaatggccgacggctctttcttcgtactcggctcatagacagacacaaaaggacgattccaagcctctccatgctgacgagccacaaaagtcaacgtcggttgttcctttatattatatggcataccgggtgtacggcttagcccttcggtcataggagcaagcgcagtaaagacctcgcgttccggttctcccttcatccagagattcatgtatatatcatcaccgcctttatctttcatatcaattgtaaaggtagctttcacatctttattggttgcagccattttcttatcatacaaataagagtaagcataaagatgcgctcccgcaaaagccagttcttccgttggttgcaaattcaaatccgtgccgtcggctgcggttaatgtcattgactgtccgaggttatgatagaagtaatcatgcattttatcccctccccgttctttccggctgcggaagacatcgacataatatcctgtatcaggacctgttgttacaatactcatcatacgagtctggtccgctcgactttccggttcacggaaataaacattactatacgtaacagaagtaaactccttgcccggttccgctgaagccggaaaacaggaacgcaaatcaaaggaatgattgcttttcatcaccggatagcttgatatcccgtctacacaaaccgtattatggctggggaattgagaataatattcggcataatccagtccgctatacaaaaaaagaccgataccggcatcgggaccgagcacatacccttttccgtaaagctccattgagatgccattagcatgcatgtggtttccttcacttgcattcagagaaatcatcaggctgttacgcgggttcataccattccgttgcaccagccatgacacattgggagcataaaacaaaggagagacataatcctctatttttcccggtttcacattggagtcgagtttcaaaggcttgtcctcaaagaaagagttgacagatacacgaacgttcttcttttcccctttatccgcatccgtttccggattcaggcatttcagcaaagctgtgaaataatcttcctgctccttctttccgtttgcctgtgcattctgtatcatacggataaagaaattcgtattcaaataccccggatgtgtatcaccaaaaccacaaatcatccgattaggaaacagatattgaggagtagccgccacggctttcgacagtacaggcattgcttttactaaatcataatgcaagttgttgtcaaactgattggcaaaatttgcataatcattgattaccacactgctatatcccggacattccgcccatattcccgtttcagcatcaaagccatagtctgcaagacgggttaaactccactgacggattccggaacggtttaatacataatcaatatagtattcacgtcctttaccgtctgcgtattccttattatcttcgagcaccaatcccacattcataatatatcgtgcctgcaacaaatcccagttgttatgagggacaccgttggctatgatattatccgcccatttcttgaacgccccggcatagattgtcatcttgtcgggataattggttttcagatagttgtatagaaaatcatataaagggacagcgatatgcaatgcatcttcgtgaattacctcaaaagaagtcagtcccaccaaagtctgttgatgaccgtgattcaggtcaacaggaacattcctgtaataaattccggtcatgtacgtatcaaagacaccggcagccagctttgcaaacttcccgtcccccgtcatccaatagaggaaagcggcgtcacgggctattccaaggatttcacagttcagactttctatattccgaccggttttcgacggatgcacactctccaatggtcggtcgggtagtgcattattacagaatgtcacgttcccattctcatcatcatcataaggcactacatccgccaacttaggacgcccgtgagtggcagttgttcctcgcgtaccggtataacgcaccgtaggataaggagccttcttccctcccgcatgatcgaaagtctctcctttcacatatacttcggtcgcatgagacttccaatacatagccagacgggataacaaccacgtcggctgaacgtccgtcaaccgggtatatgcttccgtccgctccttcagtttattgaatacatcttccgcccacgcttcggttttaatcagattccatgtttcccgctttccctccggcgtagtcagcacacgcggatgttcttgcggcatattctccggcaacgggatttcctgtcccgacgcaacattcagaaagcataaaaaatagagtcccagtaaaaattgtctcatactttaaatatcttttttaggtttactacctattaaatacgaagatagagatttatttacctaaccacatcggaaaagtccactttttatttgcctcaatccacgcctttattccaaacaaagatttatatttgcaaaaaaccgactaacaattctaatacttatgaaaattctatctatccatgatttggctacaatcaggaagaaagcggaacacaacttattattgcgcgaagaaagcaatgagaaagtttccgaaaaatgctacggactatcctccggtgcacagcatcttcagatacttatctgcggaggtacaggttgtaaagcatcttccagtcaaggtattacggacaatcttctgaaagctatcgaaaagaacggaataaccggtaaagtggaggtcatcaccgtaggttgtttcggcttttgcgagaaaggtcctatcgtgaaaatcattcccgacaatactttttacacccaagtcactcccgaagatgcggaagaaatcatcaacgagcatatcatcggaggacggagaatcaaaagactgctctatgtagaccctaaaacggaacataccgtcagcgactccaaacacatggacttctaccggaagcaactccgtatcgccttgcgcaactgcggttttatcgatcccgaaaatatcgaagaatacatcgcccgcaaaggttatttcgcattagccgattgtcttctcaacaaacaaccactagatgtaatcgacatcatcaaacgttccggactccgcggacgaggcggaggaggtttcccgacaggactgaaatgggagtttgcccacaaacagaaatcggacattaaatacgttgtctgtaatgccgatgaaggagaccccggcgcatttatggaccgttctattatggaaggagacccgcactctatcgtagaagcgatgtgcgtctgcggttactctatcggttcttccaaaggcttagtttacatccgcgccgaatacccgttggctatcaaccggctgagaatagctatcaaccaggcacgccaatacggtttgttgggagatcatattttaggaacagaattcagcttcgatatagaaatacgttatggggcaggcgcatttgtctgcggtgaagaaaccgccctgattcactctatggaagggaaacgaggcgaaccgactttaaaaccgcccttccccgccgaatccggttatctgggtaaacccaccaacgtaaataatgtagaaacgcttgccaacattcccattattctgaccaaaggtgccgagtggtttgccgcaatcggaacagaacgttccaaaggaaccaaagtgttcgccctcgcaggaaagattaacaatgtcggcctgatcgaagtacctatgggaactacactccgagaagtaatctatgaaatcggcggaggtatcaaagggggaaagaaattcaaagctgtacagacgggaggtccatcgggtggctgcctgacggaaaaacatctggataccccgattgatttcgataacctgctggccgccggttccatgatgggttccggaggaatgattgtcatggacgaagacgactgcatggtgtccgtctcccgcttctatctggacttcactgtagaagaatcctgcggtaaatgtactccctgccgtatcggcaacaaacgattactggaactgctaaacaaaataacagaaggacgaggtacggaaaaagacctggatacccttgccacactgggacaggtgataaaagatactgccctctgtgggttaggacaaacctcccccaacccggttttgtcgacactggacaacttctatgatgaatatctggaacacgtcagagacaagacctgccgtgccaaacaatgcaagtctctgctgacctacacgatcaatccggaacattgcatcggctgccacttatgtgccaagaactgtccggcggatgcaatcagtggtttagtacgcaaaccgcacgtcatcaacccggacaaatgtatcaaatgcggtatgtgcatggcacgctgcaaattcaaagctattctagtttgctaaaatctattgctatggaagataaacaaataaccctccagatagacggccattttatcaccgtccccgaaggaagtaccattcttgaagccgctactaaaatcggtatcaacatacctacgctgtgtcacatcgacctgaaaggaacctgtataaaaaataatcccgcttcctgccgcatctgtgtggtcgaagtcataggccgccgtaatctggctcccgcttgtgccacccgctgcacggaaggcatggtagtgaaaaccagcacactgcgtgtgatgaacgcccgcaaagtggtagccgagcttattctctccgaccatcccaacgattgtctcacttgtcccaaatgcggcaactgcgagcttcagacactggcgttacgcttcaacatccgtgaaatgcctttcaatggcggtgaactttctcctcgcaaacgggaaatcaccgcttctattgtccgcaatatggataaatgtattttctgccgtcgttgcgaaagtgtctgtaacgacgtacagacggtcggtgcactcagcgctattcgccgcggatttaacacgacaatagcccccgctttcgacagaatgatgacggaaagcgaatgtacctattgcggacaatgtgtcgccgtctgcccggtaggcgcattgaccgaacgcgattataccaaccgccttctcgacgatctggccaatccggacaaagtggtgattgtacaaacggctcccgccgtgcgtgctgctctgggagaagaattcggtttccctcccggcacagtggtcaccgggaaaatggtctatgccctgcgcgaattgggattcgactatgtgttcgatactgatttcgctgccgacctcaccattatggaagaaggctccgaaattctgaaccgactgacgtgctatctcaacggagacaaatccgtccggctacccattctgacttcctgttgtccagcatgggtaaacttcttcgaacatcactttccagatttgttggacatcccatctacggcccgttccccgcagcagatgttcggttctatcgccaaatcatactgggcagagaaaatgggaatccccaaagaaaagctggtagtggtttctatcatgccctgcctggcaaagaaatatgaatgtgcccgcgacgagtttaaggtaaacggaatccccgatgtggactactctatctccacccgcgagctcgcccgacttatcaaacgggctaatataggttttccgctggtgttggatagcccgttcgataaccccatgggagaatccactggtgccggcgttatcttcggcactacgggcggtgttatggaagctgccctccgctccgtttacgaaatatataccggagaatctctgaaaaacgtaaatttcgagcaagtacgcggattgagtggagtacgtcgtgctactatcaatctcaacggatttgaacttaaaataggcatcgcacacggactaggcaacgcccgtcatctactggaggacatacgaaacgggcataatgaatatcatgtaatcgaaattatggcttgccccggaggttgcatcggaggcggcggacagccattacatcacggcaactcggaagtattgtatgcacgcgccaacgcactctaccgcgaagacgccaacaagccactgcgcaaatcgcacgagaacccatacatcaagaccttgtatgaagagtatctcggcaaaccgctgggtgagaaatcagaaacattattgcatacccattatttcaacaaatcgattgattaactgtaaacgaaaagtattatgtcagatataaaactagcctgtgacgtagctgaacaaatcaaaacgatttgcgacaagcacggaaataatccgggcgaactaatcaacattctgcatgaagcacaacatctccaaggttacctgccggaagaaatacaacgtatcatcgcttccaaactaggaatccccgtatcgaaagtgtatggagtagtgacattctacactttctttaccatgactcccaaaggaaagcatcctatctccgtctgcatggggacagcctgctatgtacgcggttccgaaaagttgctggaagaattcaaacgagtgctgggtatcgaagtcggtgaaacaactccggacggaaaattctcattggactgcctgcgctgtgtgggtgcctgcggactggcgccggtagtgatgatcggtgaaaaagtgtatggacgcctacaacctgtggacgtgaagaagattattgaagacttggaataacagcccggaaacgatactaaaaaacggctactttgtttaaccaaagtagtcgtttctacaaaaaactaaacatttttacaaacaatgtgcggagagaacgagattcgaactcgtgataccctttaggagtatacacgctttccaggcgtgcctcttcaaccactcgagcacctctccttctttcggagcgcaaaagtagaggaagtttttgaaactaacaaatatttagagcgaataatgttccaaaattatttgttaaagaacactgatttcggatcaatgaataaccctgagggttaaatatataaattgttatctttgtctccaaattaatagcttatgaagttaaatggttatcaccttcttcttcctgaaggaactttggattactttgatcttgttgatgtgaaggaaagcatgaatgaagttatcatttaccttgaggagaagaatcagctccccgagaagtatgctggtcaagaaacagagagtaaagggttttatgagcctgttgttgttcaagactttcctcttcgtggcaagaaagtctttttgaacctccgtcgtcgccgttggattttgaaaagcagcaatgagtatatttcccgcaattggcgtatggtggctgagggtactcgtttgacgcaagactttgcgtcttttttaaaagaactatattgataattatccgatcagttgcaagttattgggtactttatatggcgttgacggggatttgttggaacgtcaataccgcaaccatttaagtaattacctacactgggatcagcttgctcacgcagagaactggctcctgtttgagaagaacattggtgcctacgtctgtattgacgaagtggctctttcccgtggagaactctatacagtgttgattaataaagagactcacggtggtaaaggcagtattattggtatcattaaaggtacggatgtttgcacggttacctctgtcctgcttaaactttcgcgtcgtcgccgctaccaggtgcgtgagataacattggatatggctcccaatatggaacagattgcccggacttgcttccctgctgccaaacgggttacggatcgtttccatgtacagaaattagcgtatgaagcggttcaggagatgcgggtgaaagctcgctgggaggctttggacgaagagtccatacagatagcttacgccaagacctgcggaaagatgtatcatgcgcccgttttcgccaatggagatacaagaaaacagttgctggcaaggagtatttatctgctttacaaaaaagaatctctatggactcagtctcaaaggatacgggccgagattctatttaaagaatatcccgatataaagaaaggatattatatggccatgcggttaggatcaatctatcatcagtgtaagtttaaagatatagctttgacaaggcttgcaaggtggtatgatgaagtagacaaagcggggtttctcacctttggaagggtagcgcgctcgatacaaacgcactatctgaatataataaacttctttgaaagaagggctaccaatgcagcagcagaatcatttaatgctaaaatcaaagcgttcagggcacagttcagaggagtaagagataaagcatttttcttgtatagactcgctaaattatatgcataaaatgaaaatccctcagattcttacgttgatcccttttgaagtcttggaagccggactttcgggcaataaaaaaagccacaaatcattgatttgtagctttttgtccgtttactgaccatttctgtccagtaagttcagcggagagacagggttttgaacctacaactctaaccgcttatatttcagctacttcgctttcaaaatttcaaataggtaacgaaacagtaacgattttcagatgttgggcttgtccaactttgaccgctgtttgtctgcctaactttcgggttcaaagatacggctttcttttgaaactcgcaaatatctgataataaatatttttgggttagtgcaaggtgcaagctatatatataaatatatacttgcaccttgcactaaaaaaaaagcactggggtacaaatggttaaaacaaaatccgtatcttcgtaaccgattaaaaacaaacgtgtatgataataactaaccgtgaagaagtaatagataaagcgttcggcgtatttatcaggatgaactacgagaaagcaagcatcatcacgcttgccaaagcctgcggggtgacaaaaacgggtatcgtttattattttccgcacaagctggatttatttatggctgtggcggacaaatacgtgttgcagatgcacgaaccggaaaacaagtttgccgctcccgccgctacgttggcggagttcatcgggcaatacgtggcgggggtagccgcttccatgaaaaggattgttgaactgattggcgataatagcagcccgcatgattgtagtcctaacttctactactttcactttctgtcacaagtgcgcatgtactatccgggcatcaggcagaaaattgagaaaatctaccgacaagactatgaactatgggagaaagttatacagaaagcaaaagaaagcggggaaatcaggagtgacacggacgtgaagaaaacggctatcatgttccggcaaatgtttttaggactgtcatacgaacaagcatttctgaacggtctgaacgtggaagaactggcagaaaactttcgccatatctattcgctgcttaaagcctgatagagttttgtttttttaacttccactatttttgaacgaatgttcaaaatatgatgtttttgttttatctttggagcatgaagcaaaattcagcgacatggataaggttcagaaacaaagaggaagcatcgtgctgcacaaagacgcaagggacggtgcggactacatacggatagaatatgcgaacagtcaggctgtcgccctgctgctcgcccaagaaacgggcatagaaatggctggcaacggctctgcatacatagcgtcagccgctttcagcctgccggatttctatgaccgctattcaccccacgcctatattgattacagccgggtttacgtgcggcatcccaaacctaaaagggaatacacactgcccaaaggctacctcgaactgctggaacagaagcgttacagcccctcgaccgtcaaaacataccgtgcctatttcagcgacttcatggaatatcacgagggacggaacatcgaccgcctgaaagtgccggacatcaacaagtacatactctatcttgtgaacgagaagaaaatctcggtgtcgcaacagaatatgcgcatcaatgctatcaagttctattatgagcaggtaaaaggcggcaagcgacaatactacggcggtatcacccgtgccaaagagtacaagagcctgcccgaagtgttgagcaagaatgaaattaagcgcatccttgcacaaatttccaacatcaagcatcactgcatgatttcgttggtttactctgccggacttagaagaagcgaattgcttaacctcaccccgcaagacatcaacagtgaaacaatgtcggttcgcattatgggcaaggggaagaaatgccgttattcgctcctttcgcccaagttgctggaagaactacggcactactttcgggaatatcgtccacaaaaatggctgtttgagggcgaaacacccggagagcaatattcggcaagtgcattggtgaaagtactgaaagaagccgcacatcgtgcaggcatcaaacaccgtgtacacgtacacatgctgcgccactcctttgccacacacttgctggaacagggaacagacctgcacacaatacaagaattgctgggacacaacgacatcaagaccacaaccatttatcttcatgtgtcaagtgcccataaagcaaaaatccctaatcctcttgatacactggataattcgtgaggtgcagttatagaagtgtaggaacgacaccataaggtgcggttataaataaattatgaacaattagagtacacgatatgagaaatgaaattttacagttgaaagatttgggtcgtatgcctaatgaaagcatcaatgatacagagagtattgataaattagtaaatacttatgatgccttattagaacaaatacaacttcccatatcatttgatgaagctatggtgttggtacaaatctttcctgaaaatgctttttatgatttgcagtggagtttattaaaacttgtagagtctatttgcgttgatgatgagaataagtatattcagttaataaactcttgcccaagccaagaatggcgggacactctaaatgctcgctatgcaaattataaaaaggcacaagaggtaaagtaagttcataacaagccgggataacggactaacgccgttccccgccaagccattatcaaccataaagcacataaatatgtacgaagaatttttagaaaagagcctcaataataagaggcaggcagtagatgatacttttattgccaaatatgctgatttgtcttatcccgaactgaatattttatggcaggaggtcgggctgggcagttattgtaatgggctgtttaagcttatcaatccgtccgattaccaagatgtgataaactcctgttatgagaaggaggatgacaaatcgtttctgccattcatgtgtacggctttcggcgatgtctttgcctatgtaaagaacccaagactgaataattacgttgtttatctgaatgtcagatacggaacatatttaatacttcctgccaatcttcgtgcaatttttaataaggtaatggtaaatcaaagtttcttgaaaggttggtttgacttagaaaattatcctgtaatacaagagaaactcggaactcccgactatgacgaatgtttcgggtattccctgctgttggctatggggggaagtgaggacattgaaaacatcaagatagtcaagactattccgtacattgacatctgtacacaaacaatcggtgaatttgaagttgcagataaatattagaacaggttgataacaacgcaggataacgggcaagccgtttcctgctaacccattaccgataaaacagttaaaatatacaatcatggataaaactccttttgaagatttcgacttttccagtttttgggctaataacgaatacgctcaaaaatattatataggtacaatacctacagataaacaagttgaagagattgaacgtgaattgggatataaattacctcaatcttatattgcgctgataaaacaatgtaatggtggtgaacccattaataaatgctttccaacccaaactccgacttcttgggcaaacaaccatattgcgataagtggaattatgggaatagataaagataaaccttattctctctgcggagaaatgggaagtcgtttttggattgaagaatggggctatccaaacattggcatagcaatctgtaccacaccttctgccggacacgatatgatatttttggattacagcaagtgcggtttaactggagaaccaagtgttgtacatattgatgaagaaaacgattataagattactacacttgcagcaagttttgaggagtttattcgtggacttgttaattcaaaagactttgaaagttaaatcatcggtaacaaagcgtgataacgcttacagcgttccccgcttaaccattatcaaccataaagcgcacaaatatgtacgaaaaatttttagttaaaaacctcaatagtatcaggcaagcagtagatgatacctttattgctaaatatgccgatatgtcttatgccgaactgactactttatggcaagaagccggattgggtagttattgtaacggaatgcttaaaatcataaatccgtccgattaccaagatgtgttgaactcttgctatgtcatggactatgataaatcgtttctgccattcatgtgtacggctttcggtgatgtctttgcttatgtaaagaacccgaaactgaataactacattgtttatttgaatatcagatacggaacatatttaatactccctgataatctcgctgcgcttcttaataagataattttcaatcagagtttcttaaagggctggtttgatttagaaaattattccgtaatgcaagagaaacttggaacgccggactttgacgagtgtttcggctattccccactactgacaatgggcggaagtgagaaccttgaaaatattaagatagtcaagacacttccatatattgatattaacacccaaacaatcggcagatttaagagtgctgataaactttgaggttaaaacaggttgataacaacgcaggataacggacaagccgtttcctgctatccattaatggtaattgaatatgatagactatttatattataggttttatagattatggcttcattcttctttagcagaaggagccgtatttatggcaatgcttctgttttcggtcatattaagcaccaatattttaaccgtatggggcatattaacccaatacggaattggtgaatacccgtccgatactcaatactatattattgagggtagtttaatagtattgttgagtggtacttttttcttcaagaaaagatatagaagaattataactaagtatgagaacgaaaacactatgcaaagtaaagccggagcatggatacttacaatatatatagtagtaaccttgattggcttttttatagaagcattataccgacaaggaaaaatataattcaccattaacgaagcagaataacgggcaagccgttctctgctaaaccattataaaccctaaataataacatggaaataaatataatagcaaatagaaattgtattataaaattcgtaaacgattttttaacgagtaatcatctgattttttttgattgtagtaattatgaaaaagaaggttttatttggggggatattctcgatataaaagactttattaatagagatattcttatcaatattggctctaaggctgattttgaacaaaaaataaaactgttatctcaccgcccttgtgttgaggacaaaagagatttcatttatatgactaatttctggtataagaaagaaattaagataactgatacctcttttatttggaatccgcaacaaagtcttcatgctaaatgcaatggaattgctttgaaaaaaagaataagagaatcatttaatcaaggaatggaaacatctgataatagatataataattacaataagatatttcataaatattattggtcaaatgaagtgaataattatttggataaattatattatagtggtggtataataccaatacaaccactatctactaaatcggttttataacaaggtcgagataacagctaaacgctgcccctcaccaaaccattaacatcaatagcatacatatatgaataatgtaacaaaagtaagaattatatatgaatgtagcattataggtattgtcctgctgacattcttaaaaggtatgtttccttatatgggagcatggtggcaagctgcccttatggcttcactcgtaggactatggttttcattgtcttatctgaaacagcataattataaatggggtttcaattatataggaaatcatttatacatcagcctgttgttgaaagtacagaaatggtttcagaatgctacaatcatagccctaatgatacctttattcttaaaagacctcttgtataatcaatattgttttttagcatatatattgctcgtaggtatgtttttaggtgtgaagctggctacttacacagtagagtacgctatatataaaagtaaatttcattggtaacaacaaaagatagcatctaatgatgctcctttctaaccattaaataaacaatgagttcgcccactatcttttataatcttggaaaaattacagtttggctttggtgcagactgattaaaaagaaaaatatcaaatacagcaatattatatttcaatattcagattggctgttttggagtatcggcttgggaattggaatattaataatagtatgtggttactttctgcttatccagcttgaaagctaaaaaacaattatgagtagccttatcacagtaaagagatttggaaaagttctaatatgggtatggcacagatatataaagaaagccgccattccttatgaagaacttgatttccattattcggattgggtctttctcttgacaggtcttgtcttttttggaattgtaccgggtatcaccctgctttattttgcattttggagaacataattcatcgaatatatgagcaaaagaatagaaaagaccgacaactattttgaacgggtgaaacaacgtgccgaccggacgaattataggtattacctttttgactacctgtatttcaagggagaggcttggggtaggaagtggggacggatgtcaggcttcacgctgctacttgcgtattggtggtggttggtggttctgcccggcgacattcttctgcgcaacagcgtatggtcgcatttacgtttgggttattttatcgcaatgtttttgtttttttgcatattcatccttgtccgataccggaaagcccgtgtgtcggcactgatgagccactaccgccgctccaaacgtattggcacagcgcagttatttttcctctacctgctgcccgttgcgcttttcttcttggaagcatggctgttcgacaaattgggctgggcggatggctggaagtggtaacgaatcgtataatcattcatatagaaaacatcagatatggaacaccggattacatcactgctgctatccgctcccgaagcggggctggaagcgtcctgcaaggagttggacaagaaagtaacgtggctgctgcacaacagccggaaaatggacaactacttggaacttgaaccgttcagcaaagacgggcggctgtgcggctgcgtgtgccacacgctccgaagcctgccggaaacgccgacactggcggcatataaagactacaaggcaatcatcatcctgctgggaatgtccaccacccattacgccatactggacgaactggcggaacagcaccgtaaacgggacgacatacccgaactgaccgcctactgcgatgcgctccactggatgcgaccggggcggcagtacctatacaacgtgtacaacaccgtgtgccacgcttttcacctattacgaagaaacccggtcaaggacaaccgactgcgggtgacggaaaaggaactgcgccacgccgaacggatgctacccgaactgggcaggcagactttcatcgaaatggtgcgtatgaaaggctacatggtatatgatgccgaggaactagcggaaaaatgcggtatggaatacggctcgttccggcggaaggtaaaacaaatgacagggtacaccccaaagcaatgggtaatcaaagagcgggcaaaggacgtggaacactatctgacaaatacgaacctcacgcttacagaagtggcgttcaccaccgggtttgcatcggcatcgaacttgaatgatttctgcaagacttacctcttggacacgccgggcgagatacgcaaaaaagcaaaggaaacaaaaaaatgcacagttataggaatgtaatgtgcaatatcaagaataaaacagatttttaatgcccataactttgtgcttcaaaaaaaggcacaaagttatgggacatcatataaaactggaaacatactttgccggactgctgcaaaaagtagaatggcagatacaggaatacgaggacaccgcaatggacacgctgacactgtgccgcctgtgcgtggactacctgcaagagatactgggcgaactcaaagcctttattgtctcctacccgtttgccagcccggaagaagaaatacatttcttcaaggaactaaagccgctgatagctagcaaaatcatctattacaactctgtttacaagattgaggtgcgctttcccagcggtagtgaggaagtgcaaagggactacctgctgtcggaaaccgaccggatttcaaagtcgttccagcggaacttggcgttctaccagtaccaccgcacgaaagccacttacttggacgggcagtatttcatgcgtgggaagcctgacatgcaaatcattgtggacagtttctattacgagacagacccacagttcagcaccagttacgatttcaaggtagccaagattttagccaacgaactgctggaaatatacctcaccaaccgcctgcacgaactgtaacgccgggaacagcgcaaacaggtgaagaacggcttcatgggtaagatactgcactggactgggacaaaacgggcgttggtggaacttatctacgctttggacgcctgcggctgtctgaacaagggaacggttgatataaaggagattgtaggctattttgagtatgtgttcgacatagacctcggcgacttctaccacacctacatggaactcaaagccaagaccaaagaccgaacgggcttcctctccaccctgaaagacaggctgctgatgcgcatgagggagcaggattaggacaggcgcactttaacaaaatttatttcgccacaggtgggtacatctgtggcgttttatttttcaggacacccgaactttgcagcgaatcaatcagttaccattatggaaataataacattcgagtccaaagcctataaggaactggacaacaagattaccgctattgccgattacatcttcaatcatgcggaaatggcaaagcaaagtgaagaagatatgtgggtggacagctacgaggtctgcacgtttctgaaaataagcgaaaagaccctgcaacgcctgcgggtgtcgggtactatcgcctattccaacatcaggggacgctatttctacaaggtcagcgagatacgccggatgctggaagaacgcctgataaggagcaacaaagagaacatcgacaacctgataaccaaccaccaactgtatgctaaggaaagaggaaatcttagaaagaacaagtaacgggctggcgatattcaaacactacctgcccggaaactggcgcataggtcgcaacttccttaacccgctgtacgaggacagcaaggcttcctgcaacatctatttcgaccgccggagcagcatctacaagatgaaagacttcggcaacgacagttacagcggcgactgtttcttcctcgtggggcagttaaaggggctggactgcaaccgggcggctgacttcgtggagatactggaaatcatcgaccgggatttaggcttggggctggcttccggcactcctgtttccattcctccggcaaccgtccaccggacagtatcggacaaaaccgaagaaacacccgaaaagcccgtcaagccctaccagttccgggaacagaagtttccacttgccgaattggtgtactggcaacagtacggcatcacgcccgaactgctggaacgttacaaggtctgttcgctccgggagtatcacagcgaaacggtagagggcaaaccgtacacctacacttcatcggtggcagaacccatgtacggctacaagggcaaacagcatatcaagctgtaccgcccgttctccacgccccgcttcctctatggcggcagcttcggcgaaaactactgcttcgggctggagcaactgccagcaaaaggcgacacgctcttcatcacgggcggcgagaaagacgtgctttcgctggcggcacacggttttcacgctatctgcttcaacagcgaaacggtgactataccgcccacgctggtatatcggctgacgttccgattcaagcacatcgtcctgctctttgacatggacaagacgggcagggaaagttcatgcaagcaggaaaaactgttggaagaatttggagtgaaacgcctgctcctgccgcttccgggtacgaaagaggaaaaggacatttccgactactttaaagccgggaactcccgtgaagatttcctgaaactgtttatcgaatttttagacaacctgtatagcgacacattgattatgctaaaatcatgcgagatagatttcaacaacccgcccgccaaagcgcaagagattatttcggcgggtgacgttccgttaggaacacaaggcaacctgttcggcatcaccgggggcgagggaacgggtaaaagcaattatgtagccgcaatcgtggcgggctgcatctgcccggctggtgcggaagtagatacgctgggaatacagataaccgccaacggcaggtacaaggcggtcttgctctatgacacagaacagtcggaagtgcaactgttcaagaatgtaagcaacctgctggcacgagccaaacagccggacaaacccgatgaactgaaagcgttttgtcttaccggcatgtcacgcaaggaacgcctgaacgccattgtgcagagcatggacaagttctactaccagtacggcggcatccagttagtcgtcattgacggcatcgcagaccttgttaagagtgccaacgatgaagcggaaagcgtggcggtgatagatgaactttatcggctggcgggcatctacaacacgtgtattctgtgcgtgctgcacttcgtccccaacggattgaaactgcggggacatttgggcagcgagttgcagcgcaaggcggctactatcctttcgatagagaaagacgaagaacccacgcagtcggtggtaaaagccttgaaagtgcgtgacggtagcccgctggacgttcctctgatgctctttgcatgggacaagaaagccgggatgcacgtgtacaagggggaaaagccccgtgaggaaaaggagaagcgcaaggaaagggaactggtgaatgtcgcacgtgacatcttcgggcggcagacacgcatcacctacatagacctttgcgagcagttgcagcaggtcttggacatcaaggagcgcaccgcaaagagctatatccgcttcatgcgggaaagggacatcatcaccaaagacacggcgaaccaaagttgttttgtcataggttcatataatcttcaaaggaacacaagttgtccataagcgtatggatgaaacttgtgtaattcatgtgcttgtgtcctgccctgttgtgataacacggcaggatttctactatttacaaggttattccagtgatttttactacttttgcaaaagtaacataagagaataacggcgattgaacagtttcggctgcgatttcgtcttttatatatataacatatacgttcgccgaacgtcccaaagtagaaaactggcacttttcaaaaagaggggatattcagcgcaggatatgctatgcgtttgtcatagcgtggctgcactgtttcctcttttgggtatgccagtacctctactttgaaacagcgtcatgccacgctttctttttggggtggcggctaacgtgccaagacagtagggatttatatcactttaatacctgacaatatggaacaaatcaaagcgcacatcgccgtatcgctggacgggcataccgccacgccggactatgaactggactggatgccccgtgatgtcaaggaactggcggcaagggaacacgccaccgcaagctgcctgcttatgggggcgaacacctacaactacatctttgaacactggggcgggtggccgcacaaaagcaagcggtcttttgtggtgtcacactacgataccaacgtgacaccggactgcggcgtggagttcctgaccgaagaaccgctgcaaagggtctatgaactgaaacaggaaaccgatatattagtggtgggcggcggcaagctgcttacttcgctgataaaagccggattgttggatagcctgactatctacactgtccccgtcatggtgggcaagggtatcggtttcatcggggaaacattaggctcggaatggaaactgtcggaaagcagggtgctggataacggggtggtctgttcgacttacctgtttggcgggagcgtataaaaaatgcgcccggttcccgccgggcgcaaccactaaaatttcaattattataagtcgtaaaacctatcacaatgaaatttcagtggcaaagataggctatttcttcggtttcgctttcttttcggggaatgaaaaggcgacattgaactgttcgtccagcaccagcgaagcatcgaaagcgttgccgttcttgcccttgaaccccttgattagcccggtcttgcgtttcgtcaccagctcgacaatctgtttgtcggaaagctgcttgtcgcacttgttgcggaatatggtaagcgtacagtccacgttggaacacttcgccactttcgggtagaacaggatgcgcccgttattgcatttggggcagggacaggtttcactgcccgcaacagataattgtaccgaaagcagttccgccgtgatttgggcggcgtacacctcgataccctttcggaacgtgtcggcatccatgtttcccgcttctatcttggcaagggcggtttcccacatgcccgtcatttcgacatcggcaatcttcttgtccttgacaatcctataaacggcaagccccttgtcggtgggtacaaggttcttcttctcacgcacgatgtactggcgggtgaacagcgtttcgataatcgccgcacgggtggcgggtgtacctatcccggcttctttcaagctggctttcagttcggcatcctccagttccttgcctgcgttttccattgcggcaagcaggctgctttccgtgtgcagcggtttcggcttggtctgtttctccaacagttccacgttggaaataggcaggttttcgcccttttggagtggcggcaggctggcgatttcttcatcctctcccgtttcctgctcgctgaatacggcacgccacccggcttctttcatcaccgaccctttcaccgtgaagtcggtatctccggcagacagcacagcggtggttacgtctttcacgcacctgcccgaaaaggcttccagcatacgcccggctaccagttcgtaaaccgcccgttcgtctttggagagttcaccgggcaggttttcagtcacgattaaggcgtggtggtcggtcactttgccgtcattcacgctacggcggttcagcgttacgccgttcaatccggcggcatatccggcaaagcgggggtactgccccagcatggcgacacgttccggcatttcatcgaaaacgtcctccgggatatagcggctcccggttcgggggtatgacatcactttcttttcgtacaggctttgcgctatggaaagggtcttgtccgccgaaaagttcagtttcgtgttcgcttccttttgtagcgtggtaaggtcatacaaaaggggcggttcttggctggtttctttcctttcaacggacttcaccgcaagctgcccggcatcctttacccgttgcagggcggctatggcttcgggctgctgctcccacttggcggtagattgggcggtgaaactgattctaccgctggcggtatcggctttgagttgccaaaatttggcgggtacgaaattcttgttttccaaatagcggttgcatatcatcacgagcgtgggtgtctgaaccctacccagtgagaacacgccctgcccggctgccacgctcaacgcttgggtggcatttatccctatcagccagtcagcttcgctgcgggacttggcagaaaggtagaggttatcgtaacgctctcccggctgcaagttatccagcccctcacggattgccctgtcggtaaggctgcttatccacaggcgtacaaagggcttggtacagcctaaatagttatagatgtaacggtgtatcaattcgccctcacgtccggcatcggttgctacaataatcttgtcgcactggtcgaatacctctttaatcactttcaactgtttcaacacgccggggtctgccttgtagcctttctcggctttcacctgacgggggattagctggaaatcgggcggcagtatgggcaggctctcccggcggaagttcgccacgccgtaggcttccggcatggcaagctggattaagtggccgaacgcccatgtcaccatatacccgttaccggaaaaataaccgtcattcttctgtgtcgccccgattatgcgggcgatgtcttttgccacgctgggcttctctgctatcaatgcaatcataattatttactttttaaaggtgggtactacattttcattcctttggacttcttgggcttgtccgctttcaggctcttgtcttgcgccttgtcctgcttctctttctgcttggcggtaggcttctgctgtccctgtttcagcggctctttgccctgcttggtggcttcgttggtcttgccctctgtattgaccgctacctgtgtccggctctcggcagcgggggtaacgtctttcggctgcaccttgtcgggtgatttgccctgtgcgcttggctgcacatgaccgttgaactccacgcccttgccgtcctttagcccggctacctgctgcccctgctgcaagaactggacggcggcacggggcaggaactccaagccacgctccaccgcactgacctgcaaataggcactgcgccgtgtgccgtccctgaattgcaggttttccattttgaccgcttgcccggcttcaaaggcggctttctgttccgggctgactttcacgttacagattgtatcggggcatttccatttgtctgcccgcatgtattccagttcgtgcgtgtacctgtcccggctgacgaacacggggatttgttcgccgcttttcgggtctttgatttgtgcgatgccgcccaagttgccagtaccctgcaagttgccctgttcctgcttggtgaagtcgtgttcatggaacgggcgttgcaacagcttttcatcctgctgtacgccatgcagcttgggtactaccgtaccgtcctttgcctgatagaaagagagcttgacatcggtaggtttgaggtaaaagccgcctaccgtccccgaaacggtgtaagtgttgcgggacttgtagccacgcatcacccggtcgaagtctttcgtgtttttcagggtgtcggcggtaatgccgacttttttcaggttctcccagtcgatttttgccgggtcgaagcggtagccctgcttgaactcgtggaagtcgggcttcggcactcgaagcatttcagcccgcttgtcgccctccggtgtagggttgcggtggttgtcctcgattgcctttgcctgctgttccgcttcggatgcctttacgctgaaaagttccagcccggaagtgtcctgaaacttgcggaagaaattggaaaggaagttgctgaacacatcgctgttcttgtccacctgcatgaactcgccgccgtgtgtcggctgtacggtctgcaaattgccctccttgtcgatacccttgacggcactcaccttgccctgctgtttatccaagaccagcagcacgtctttttcctgcccctctgcgggcggggtcattctgtttgccataaataattggaattttagtggttacgggaatagtcccgcccaaagatagccactaaatatgctatatttggataggcagaaaagagtgtccgcatttgtcctgcgctgtcccgatttgtccgggtggatgaaattctgcggttaatggttgcagaattggaaacgggcataaaaaaagagagcgaagttaaccactctctttcaatgaaccctttgtgaaccctttaatagattagcggggaacgctgtttgagcattatcgcgcttcgttagtaatctgttattgcacttgtttcaaatccccgatagattgggggacatttctatgtaaggaatagtttttagaatatggatgttatctattgcttctttaccacccaatgccaatgccggtacaagtcatggaaatcatagggaaataaaataattcatcgtccttattatcaatcacttgaatatttcttgtttttctctatttttgccatattttacccattttctgttattcagcatacttttagtacactttgaaatatcattttcttttgtacctttgcatccgcagaaaacaaaagagaatcaactatttagtgtaattacccggttacagtatcaaaatcgggataaaacctctaaacaatggcaaagttagaaaataaaacgaaagaaaaccccaatctgaagcaaaataagctctcggacggtagaataggcttttacttagagtattatttcttcctcaaattattaaaagtaatactggcaaaaagaaataccctttattcttttcgccagtacctatatcttgcagtcaacagaaaaaagtttagtacggtttggatatatagacaaaaaacagactaaactccaaacatggaaattcagatattttttatacatttctcttatatacaaatgatagccgaattcaattcatatatgagtaacatagacatagacttcttcaaggagttgtgtctgaaacatggagagttacgacattataaaaagaatgagtttattctccatgaaggtgatgcttgttctttcttcgggtttatcttgtcaggcgtagtcaaatacagttgcaccaaccggacagaaaacaagctgtataatgtcggtttttcctttccaaatgaatttatagccgattatcccacttgcttatatggcatgaaatcagaattgaatatacaggcgataatcccgtgcgagatttacatctgttcttctgcattcttacagcaaaaattcaaggaaaataacgaaaaccaacggatagcccgtatcgcagccgaacagatgtttttccaatcatattcacgttatttggatttattcagattcacaccggaagagcgttacctccaacttttaaaaaaatgccctgcaatcctccaaatggtatcactaaaagaaatagcatcctacctcaaaattacacccgtacacatgagccgaatcagacgcaagcaaagttttgacaacaaaaaataaacataggtttagaaatttacattcataacaatattccaagagtatcttaatctgccaaaggattcttctttttatctttgtcttatctttggttggttcaacgaagagacaaaataaagattgaatgagttaaacaagagattaaaagagaatatgaaaacaaaagaaattcttggaatacttatgctattcctctgtacattcagctttataagctgcgacgatgataatgaacagacaaatgaattaacccccgaagcactttatcagacttcatggcgtggaacagggcattgtgaagcttgggcagtacaaaatatgggggtcggtatgcaatttgtagatactcggaaagggaaagtaaattgggaaggttacgatgaaattgatattacttatacaatagaagggaaatatatcacatttaatagtaatgctttatatttgggtggagccccttgggttatcaaaagctatacccaaaaacatataaccattatacagaatgaaattagtccagataaagagaaagtagctacaattgaattagaaaaaatagattaaactgaatcatgggaacattaggttgcataaatgtatgttacaacagaacaaagagaaccgtgagattcgcaaattgagcaaagaaaggatgaaagaacatcataaataccttgtaaacaaaggaaaaaatacagattcatctaaaattcctttatgtgctattatcgggctggtctataggatgaaatacaaggaaaagagattcaccttgttctcttgtataggattgtttattgggataggatgagcaatttatatgctgctaataaggtcaatataaatcaaagtaatatgaaactgaaaaatatattgaatactatactatttgttttggcattatcttttttgtctatgtgtatatttaagactacagagttaagtttaaaatgtatgcaatttgctgtatctatctcctgtataggagcaatgttttctacaaaaaggtatagatatatatttgcatctattgcattaatcattataggaatatcttttttactttaaatgtccataataacgataataatttgattgttgctaatggtataataataagtccagtccaaagatagcaactaaagacggcggcaagggatgcccgaatttgtcctgcggtgcttgaaattatacgggtgcggtaaatctccaactgttggtcggagatttaaaacgggtacagaacgaagttaatcgctcgctttagatgagctatttgtgagccatttgtgaagcgtttcctattttgtcaataagataagaatgaacgatatatacataatcaaggctgaaatatagcttattttggagcgtttgtgaagcgtttgacaagcctttaattgtgttccttattctcctattatcaagtgacacgacagaaagaaaacatcttcgacaaaatatttgttatgtttttgcatgtaattacatattatactatctttgcagatagaaacaaagtacataaatatggcttcattcaggaaagagatacttgggcagattgaacggatagataccgggcgtatattcacgttccgggatttgtcgtttgaaacggaaaagaccgctaatgttgcggtgctgctctccgaacagagccgcaaaggggtactggtacgggttgaaaagggtgcgtactaccgccccaagaaatcggtcttaggattggggaagctgcccgtctatcaggatgaacagtttcgttatcttaccgaaaaactgaacggctatattacgggggcttacgtctataacaaaatggggctgaccgaacaggtcgccacaaccataacgatagccactccctatccggtgcgccgtttccgtttcaagaacttggatatagagtgtgtgaaagcctattgcacggactactcggatgaaagccttgtaccgtacttgcgactgctcgatgcgataaaggacatgaagcgcatacccggaacaaccgggcaggacatctacaaccgggtcaagaaccaatatttcaacggatatagtctgccggaactggagaaaatcgtatctttggcgaaaagttacccgccacgtgtcagaaagactgttgcagatatactgggcgacatcagacaaaccgtgttgcaaacggaaatggcaaagaccattcttcccacgacacggttcaatttggattataaaacggcataagatagagatatggatttacattcggataaggaagcgttcaaggaaatcatcgcactggcggctgaacagttcagctacgagcagtcgcacgtggaaaaggattactgggtatcgaagatactgcgggatatttctctgtccgaatatgccaataagacctacttcaagggtggcacttcgctttccaaagcctacgggctgatagaacgtttctcggaagatttggacttgttcgtgttcacgggtgataaaagtgcgtccaagcaggctgaaaagacattgaacaagaaactttccaaacacatcgccgaacttaacagcgacatatacaaggatgatttgtcggaaacgggcggcaactaccgcaagctgtatttctcgtatgaaaatgtatttcaaggcgtgggattgaaagaacatttggaagtggaaataaagtcctgcgacctgccggacaaacaacaaatgttctaccctgcggacaaacagacaatcaaaccgattgtgactgcttttcttgaaagcatcgggcaagaggaactgataagtacctacgggctggaaagttttgaagtgcagtgcatcaacccccgaaagactatctgcgacaagatttcaaggctggtaaagttatcctacaacgaggatgccgccgcactattggcaaagcatatccgtgacgtttacgacttgtcggcactctaccacaatcaggaatacaatgactacttatattcggaagatttcttggatgccatgtaccgggtaacaatagaggacggactaaacaaaaactcccgttcgcacttgtcactggctgatgcaccgatattcaaggatgccgaagcggtcatggcgttgcccgaagtggctacggcgtacactaccgatttgaagaagctgacttttgacaaaagcaggatgccgccgataggcaaggcggtgaaagcattgaagaacctacacgaaatactggtgcgttttgaagcctaccgcacccaaaagcaaaatgaagaacaaccgtaaagctacatcggctgttcttcactccatacattatattatatacagctattcttcctcttttatcaaatggcatagctccgggtcgttcttaatccgggttatctcgtcctcgacaatctgccggacttcctgccggatgcggtcgtagttggcttgtatctcttcctgcatccggtcgttgccgtccttgtcgatgaagtcgattatttgcggaagtttcacgtagcgggcggtttcccgcttcaccttttcattgtccaccacgatttcacagtggaaaatcttctgctctatccgttcatcgaagttgtccgctaccgcccccacgaacatgccttgcgtgaggttggatattttactggcgggtatcaggctgtccatttgggtgcttatcgaggtggacttctcccgctggtttatcgtcatgctctgccgcttctgcaacacctttccgaaacgctccgacagtatttttgccgtttcaccgactacctgaccgctaaacacgttacccacagtattttggattactttgctttccttgtcgccatagtcacgtgtaagctgactgtaatcctgaaatcccagcagaaccgccactttgttgcttcgtgcggtggcaatcagattgtcaagcccacgaaaatatatggtcggtagttcatctattatcaccgaacttttaagctgacctttcttgtttatcagcttcacgatacgggaattatacagccccagtgccgccgaatagatgttctgacggtcgggattgttgccgacaaccaagattttaggctctgccgggttgttgatgtccagtgaaaaatcatcgcccgtcattacccagtaaagtgccgggcttatcatccttgaaagcgggattttcgcactggctatttgcccctgtaactgttcgaccgccgaactctcccaagcatccacgaatggagaaaggtagttttccagttcgggatagctgcgcaaaatcgtgaaaacatcggcgtatttcttgttcagcagttctatggcatggggaaacgtgcaatacttaccgccctgatagatgcgcaaataccaaattatagccgccaaaaggataatcggactttccacgaaaaagtcaccctgcttgcttatccaagagcggttcaagttgagcataatcgtgtagctggcttcgtaggcatccgcaatgtccgacataaagctggcatttatcgggttgcatcggtggctcttgcgggggtcgtcaaaattgataatgtaaaacttcggttttaccttgtaaccgtccaagtgattaagtaggtgattgtaagcaatttccgaaaggtcgggaaacttgtaatcataacaatagagtgcgaaacctttctcgatttgctgttttatgtaattatttaccaccgcataggatttcccgctgcccggagttcctaacacgatgctcgcacgaaaaacatttacaacgttaatatagccgttgttccatttctttttatagtaaaaccgggtcggcaaatttacggaatactcgttttcgataagccttgtttcctgcatgaaactttcgttctccatattaaagacatcatccataaggttgttttttaacagacgggacatccacgtacctgccataagcatacagatatagcctgccgacagcgtggtgatgtaaaacaccgtacctgccgtatggggcaggggaagttccagcagccaccagttcaggaaaaacagcaccacacccgccgcaaggctgcaatgtatcttcgcccatgttatcttttcctcttttacgcccttagtgccgatacacgacagggcgagaaacaccaccgaaaatagttttgtccataagatagacgagaacagcccggtagtgcgctggaagttccacagtatcttgtctattacttcaaaggtcactccccactctttcagggtggagtaacagaaccagtacacgtttattcccacgaataaaatactgacagcccgcataaagtccatgacccttgcaagccctctcaaatcatcttcttgctgcataattgtatgtttttaagttagtcaatacgccttgtgcgcttctttttcttctttctcttttggcgggcggtgtcctgcggctcgtcaccgcctgatgcaccgccgcccagcaaaccgccgaaagcacccaacacggaagccacgcccgaaacgatgtcggatttcggcgtgaactccggctgttcctgatgcgtggattggtcttgctgcggtgctgacacttcgggctggtgcatctttccggtttcgcccgaaaaacgttcgttgaacacgttcgccgaatactccttgcccaagcgtgagccgttcagcaccacccggctgtcatagtcgatgaacgtaacgccatagatgcgcccgctgtcattctgacggaataccacgtcaatgccctgcttccttaactgctgttccagttccctgcggctgcgggcggtctgcatggcagtggctacaatcttccgggtgcgctctttcagctttccgttcttaatcagctcgcccgatttctccattctgcgctgcactgcttcatagcccaccgacttgccgatgcgggaagcctttaccgggttgcccaccttttcgcccttgtcattcatggcggaatagacaatgccctgatagggcttgccgtttacctcgcctttgacttcctcggcacatatattataggtggcaagcaaagccttgtactccccgaacgactggaagcggtagccatagcaagccgctttcacggtattgccgatttggtgcttcacgtccccggcggtgtagtccacctttttaagttccgggcgttccgtcctcgttttcctctctgccggatgcaggttatatttctgctccaattcacgggtgatttgcttgctgcgccgatgctcgaacttgtcattcagcggtctgccgttctcgtccacccgcaaccctacgatgtggatatggtggcggtcgatgtcggtatgcttgtacaccagataaggctggtcgccatagcccaacttccgcatatactctttggcgatgtcggaaagctgctggtcggtcagcacgtcttccgggtgcgggtttatggaaatatgaagtatcggcttcttggtggatagctggacgggcatctgcatttcaaagctgcgcatacactcgccgatagagaaattcccgtcctcgcccaacagcatccggttggagaaaagcacctttgcttccccgctgtccaccttgttttggttgtaagccagtgcgccgaacatattgccgcccgtgcttattttggcaaccatagttccctgcactcgtttgtcaggtcgataacctgacggttcaacatcgccagttcggtggtcgctttctccagtttatagagaaaagccagtgcctttttctccgaaaagttgctgtgcaacgcctttacgacttggttgtaattgactgcaaccgcccggaactgggcgtaaaattcggtcagccgggcgcaatattctactgccgatttgtccactttcaccacccggaacggctcgccgaacagccgggcggcgatgaaacgggacttgctcgtaacgcccgactgctcccattgcgagaggaagcgggcattctcccggtcgttcaggtaaaggacatggcgatgcttcgccgggtctgcgagggcggggcgaccgcccttgttaggttttcttgtttccatgcttctttcaattaaaaaattacgacttcggagtgatttttacccccgcaaggggcaaggcgttttcaggcacggaaaacggttttgtagcatacaaaacacaccttgctattttctgacgaaaatcgaaatccgtcacggacggattggggttagcgtggaacggcaagccctgccgttcaccagcccggttttacacctttgccccctgcggttcgttactccgctgcaaagtaacggtgatttataatgctgtaaaataggcggttggtggacaaatcgggacagcgcaggacaaatcgggacacatctaaaaacgaacgttttttctccttttatttgcagaagatttcaaggttgaaagccatatttcaagcaagaaagcaggatagaaagcaggatttcaagaaaacgtgattgcaggatttcaatatttcaagaaagaatgaaagctggaaaacaagattgaaataaaacagtctttcaatatttcaagattgcaatatggaaacaaagaaagctatatggctggattgattgaaagcaataaataaatctatcaaccaataatgaacgaaagcaatatggaaaacgagaaaacacccctttatgtcgccttttccacccaaaagggcggagtcggcaaaaccacctttaccgtgctggcggcgagttacctctactacctcaaaggctacgatgtggcggtggtcgattgcgactacccgcaacactccattgccgggatgcgaaagcgggatgccgagcaggtcggggcggatgaagattacaagcgaatggcgtatgaacagtttacccgactggggaagaaagcctacccggtattgtgcagttcacctgaaaaggcgattgcaacggctgacgaacatatagccgccggacacgtgccggatattgtgtttttcgacctgcccggcacggtgaacagcgagggcgtgataaactcccttgcaggcatggactacattttcacacccatttccgccgacaaggtggtgctggaaagcagcctgtcgttcgcaatggctatccaaaagctattggtaaggaatgaagcctgccgacttgccgggctgtacctcttttggaacatggtggacggtagggagaaaacagacctttacaccgcctacgacaagaccattaaggaactggaactgccgctgatgaaaacctttatccccgataccaaacgctacaaaaaggaactggtggcggataaaaaggcagtgttccgctccacgctctttcccgccagccgctcgctggtaaggggaagcaacttggaagaactgataaccgaaatagtgtactacatcaaattaaaatgatatggcaaagcaaagcggcgggatgccgaagatagacgaggatttcatgaaagagcttatctcgcagggtgttcccagtaaacaagataataataagacgaatgatgtaccgcaagaaacacaaacagaaacggtgcaagtagagaaaccgacaccccgcaggcgcaagggcggttcgggcgactaccaggaaacttactttcagaaagtggaactggcagaccgacagcccttgtacgtgagccgtaccacgcacgagaagctgatgcgtatcgtgacggtgataggcgggcgcaaggtgacggtaagcagctacgtggaaaacattctgctgcggcacttcgagcagtaccaagacgagataaacaccctgtacgaaagccacttccaaaagcctgtctgactatgataatctattgcatacttaccgggcttttggtgtactatatcgccctatggctgtggtatcgctacacggacagccggacatcaacgggcagaacggatgatgcgccactcccacgaaacggggtttcaggctacacgctgataggtgaaagccgatacaagggcggactaatcgggacagcgcaggacaaatcgggacacctcccgcaagcggctgaaaatgatactatttttgcgccgcaggctgacggacagccggaagaaaacattccggaaacagcagccgaagcggaagaaacgcccggttacgagaatgacgaacccgactacgaggacgaggaaatagccgggtacatggacggtgacgatgataccgggcgggctacgggcgtgagcttcgatgaactgggcgaagcggtacgcacggcgaacgccgacaaccccaccgaagcggagaaacggcaaaccgccgggacactggcaagcattgaggggacgaacctctacgatgcggtggtggagaacatcaacggcgggctggcaaaggtggcggaactgctgggacgcaacgaagcggaactggctgtggctgctgtccctgccggaactgtcgatacaagcgaggaacacgaagcgttcgacatgaacgatttcctataatataataattataagcctgacagcatgaaacaacgggattacggttgattggcaacctgaaaacaaacagacaaacgggactatccccgaccactaaaatttcaaattattcaccagccgggaaaggcggactatccacccaccgcccggcattaaaaacaaatcacaatgagaaagaaaatcttcttgtcggcggctatacttgccgccgtggtaagtgcctacgcacaaggaaacgggcaggcgggcatcaccgaagccacgaacctaatcaccgggtattttgaccccggaacaaaactggtgtacgcaatcggggcggtctgcggcttgattggcggggtaaaagtatataacaagttttcaagcggcgaccccgatacctcaaagactgccgccagttggttcggggcgtgcatcttcctgattgtcgccgccactatcctgcgttcgttcttcctctaaaaaggcggcaatgtctgaatatccggtaaacaggggtatcgggaagccagtggagttcaagggcgcgcacgtaatggttcattggcaaatacgtcaatagcaagacgttaggcaagtgttcgatagcctatcatcaatcggcttatccgaaagggaaaccagacggggagtatagcctgccgataaactgataagtcatatagttgccagatatgcgactgaatcaggagatgaaagatagatatgaggataaagtctggattgattgaacgatagtccaagtggtacaactcggaactatggcggaaggtaactacaaacgccatactgtaacacactcgattcgacctttgaggattgggtgcagaacaggttacagcacaactgcaataagcagaaacgaacgaaagtcgtatccgacaatctatcaagctacgttgccaaagagctaaacgtggattacctaacccggaatgccgaaaggctattaggtttcagacctatgaaaatccggtatggtaacggagccaccgtagtagtccgagcgagggaaagcctcgtacatggcgaagggtggcagctaacattttttaatacaaattaatggaaaatgtgtgagacattatgagaagtccagagaaagtattaaacagtctgtcagagcacagcaaagtttcggactataagtttgaacggctctacagggttctattcaattcggatatgtttctacttgcctatcataatatacaaggtaagcaagggaatatgacggagggttccgacggtaaaacaatcgacggaatgagtctaaaacggattgaaaatttgattggtgcgcttaaaaatgaatcgtaccaaccgaaaccagcgagaagaacatatatcccgaagaaaaacgggaaaatgcgacctctcggcataccgtcattcgacgataaattagtgcaagaggtactgcgaatgattatgggagcaatttacgaaggaagttttgaaaacacctcgcatggcttccgaccaaaacgcagttgccataccgcactaatacaggtgcagaagaattttactgcggctaagtggtttatcgagggcgacattgaaggattttttgataacatcaaccatgatgtgcttatcggaatcctgaaagaacgcatcgcagacgaccgctttatccggctgatatggaagtttctaaaagcaggctatatcgaagattgggcgtttcacagaacgtacagcggaacaccgcaaggtggcatcattagcccgatactggctaatatttaccttgacaagctggacaagtatatgaaagaatacgctgataaattcgataaaggtgaaagacggggaatgaaccttgagtacaaaagctattccggaaagatttggtggctcggcacaaagctgaagcaaaccgaggatagagaaactcggaaagaactgattgatgcaattaagcaacatcagaaaaataggatgcacttgccctctgtcgatgaaatggatgagggatatagacggattaagtatgtgaggtatgccgatgattttattatcggagtgattgggagcaaagcggattgcgtagctatcaaagaggacattaaaaacttcctcagcgaaaaactgaaattaacgctgtccgaagaaaagaccttaatcacacacggaaatcaaaaggctaaattcctcggctatgaaatctatgtccgaccgttcacggataagacattgaggggcaagaaatcgggagttcttatcaaggcttacggtaaaaaggttgtattagaagtaccaatgtccacgatgcgggataaacttctttactacgaagcgatgaaaatatatcaattcgaaggtaaagcgaagtggaaacccacaagtcggacgaaaatgttacatctggacgacctcgaaatactggacgcttacaatagggaaatccgaggatttgcaaactatttttcaatcgccaacaacagttcgcacttaaattctttcaagtacatcatgcaatacagtatgtataagacttttgcacgaaagtacagcaccacagtccgcaaaatcattgcgaaataccgattcaacaaggattttgcagttttctatgaggacaagaaaggtagaaagaagatgcgggtgttcttcaatggtagcttcaagcgcaaaacgaccgctatggaagcgagttgtgataatgtagccaacacaattttcaataccactgtttcaagccttatacaaaggctgcaagccggaaagtgtgaattgtgtggtgctgagggtaatatcgaaatacaccatgtcaagcgtcttaaagacctgcaaggcaaaaagccttgggaaatccaaatgattggacgtcagagaaagactatggtagtatgtattccctgtcacaacaaaatacatgccggtaagatagactgaatatgttagtggagagccgtgtacgctgagaggtgtacgcacggttcggaggcgagttctcggaaacctaccgtagaaatacggcaaggcgctgggctcttagcctacggctgaaaagccagtacctctttatcttttgcggcggcttgctcgccgtcttcgtggtgttcatcgtcctgttcatggcaggcgtgaaccagtggctatgtatcggtttcatcgtgtcggcttcgctgctgctcgtgtggcagacgttccggctcaatgccaagtacggcacgcacgggctgatgaaagctgccgcacgcaaaagacacccacgcttcattattagccgaaaggcgataccccggctgttcaactacaaaagaagaaaggaagaaagaacatgaggaatatgttaaaggctaccacgctggaaaggaaatttccacttttggcggtggagaacggttgcatcatttcaaaggatgcggacataacggtggctttcagggtggaactgcccgaactgttcaccgtcaccagtgccgagtacgaagccatacattcggcatggtataaggcaatcaaggtgctgcccgactactccatagtacacaagcaggacttcttcatcaaggagaactaccagcccgacacggaaagggacgagcttagttttttaagccgctcctttgaacggcacttcaatgaacgcccgttcctgaaccattactgctacctgttcctgacaaagacgacaagggagagaagccgccgacagagcgacttctccaccctctgccggggcaggattgtaccgcaggagatagccgacaaggaagcggcggcaaagtttatcgaagcggtcgggcagtttgaaaggattatgaacgacagcggttttgtcacccttacccggctggcggcatcggaaatcaccgggcaggacggaaaggcgggcatcatcgagaaatacttctcgctctcgcaaaccgacactacttgcctgaaagacatcgggctgtacccggaagaaatgcgggtcggggacgatatactgtgcctgcacacgctttcggacgtggaagatttgcccggaaaggtcgggacggactgccgatttgagaagctgtccacagacagaagcgattgcaggttaagttttgccgccccggtgggcgtgctgttgtcgtgtaaccacgtctataaccagttcatcttcatagacgaccacgccgaaaacctgaagaacttcgagcagaccgcccggaacatgcaatcgctctcccgttactcccgtgccaaccaagtgaacaaggagtggatagacgagtacctgaacgaagcgcacagcaaggggcttatctcggtacgctgccactgtaacgtcatggcatggagtgacgatagggacgaactcaaacgcatacgcaacgatgtgggaagccaacttgcgctaatggagtgcaagccacgccacaacacggtcgatacgcccacgctcttttgggcgggcatacccggcaacgaagccgacttccccgcagaggaaagtttctacacgttcttggggcaggctctctgcctgttcgtggaagaaacgaactacaagagttcgctttcgccgttcggcatcaaaatggtggacagggtaagcggtcgcccgctgcacatcgacatatcggatttgcccatgaagaaaggcatcacgaccaacagaaacaagttcatacttgggccgagcgggtcgggtaagtccttcttcaccaaccacatggtgcgccagtgttacgagcagggtgcgcacgtgctgctggtcgatacgggtaacagttacttggggctgtcccagcttatccacaaccgcacgcacggcgaggacgggatttatttcacctacaccaacgagaacccgatagcgttcaacccgttctatgtcgaggacggggtatttgacatcgagaaaaaagagagcatcaagaccctgatactcaccctgtggaagcgggatgatgaagcccccaaacggtcggaagaagtggcgttgtcaaacgccgtgagtgcctatatcgaactgataggcaaagaccgttcggtaacgccctgcttcaacacgttctacgagtttgtccgggatgattaccgccgacagcttgaacagaagaacgtcagggaaaaggattttgacattgacaatttcctgaacgtgcttgaaccgtactatcgtggcggtgagtacgactacctgctgaactccgacaaggagctggatttgctgcataaacgcttcattgtctttgaattggacaatatcaaagaccacaagattttattcccggtaacgactatcatcatcatggaagcctttataaacaaaatgcgcaagttaaaggggataaggaagttaatactaattgaagaagcgtggaaagcgattgcatcggcgaacatggcggactacataaaatatttgtacaagactgtccgaaagtatttcggggaagcgattgtagtcacgcaagaggtagaggatattatttcttcccctatcgtgaaagaaagtatcatcaataactcggactgcaaaatattgttagaccagcgaaaatacctgaacaagttcgacagcatacagaacctcttgggactgaccgacaaggagcgttcgcagatattgtctatcaacatggcgaaccaccccggacggaagtacaaggaagttttcttctcgctgggcggcacacaatcggcggtgtacgccacggaagtttcattggaagaatattacacgtacacgactgaggaaagcgaaaaaatggaactgttcgctcttgccgagaagctggacggcaaccttgaactggctatcaagcggcttgcagaaagcaaaagaaatccccaatcatcaacaacttaaaaattaggaacatgaaatggattgacaatctgatatacacgctattgtccgcctgcctgctggcgggctgcgaggacagcggaagcaaggagctggaaaggatgcagggctattgggtacacgtcaggggacacccggctttcacactctcggaaacgggcggcagatacaccgtcacccggaaagcgaatgtcaggggcagaatactggaaacggcttacccggtaacagaacggaacggctgcctgttcatcgaaacgggcttccgcatacagttcacctatgacaaaaagaccgaccggataacgctcatgcccggcggcgaatacaaacgagttacaaaccctgaaaacaaaagataatgaaaagaacaattctccttatggcggtgtgcctttgcttcatcggcaaggcatccgcacagtgggtggtgtcagaccccggcaacttggcgcagggcatcatcaacaccaccaagcagatagtgcagacttccaccactgccaagaacacgctggacggcttcatggaagcgcagaagattttccagcagggtaaaaaatattacgatgcgctcaaagcggtacacgatgttgtcaagggcggcatcaaggtgaagaagtccattgagttggtggcggaaatatccgaaatctacgtgcgaaactatcagaacatgctggcagacccgaactacacgccggatgaactcaccgccatttcagccgggtacgcaaagctgctctccgaaagtgcggacgtgttgcaggacttgaagaatgtagtgaacgtgacgggcatgtcgctgacggatgccgaaagactggcggtaatcaacaacgcctataaaagcctgctcaactaccgcaacctcgtgaactactacacccgaaagaacatatccgtgtcctacctgcgggcgaagaagaagaacgacaccgaccgggtgctggctctctacggctcggcggatgaacgctactggtaacatataaatcggtatgcctatgttattagcagcggtggattttgacaacctgcaccaagtgttgcgggtgctgtacgatgaaatgatgcccttgtgcagcaacatgacgggggtagccaaagggatagccgggctgggagctttgttctatgtagccgccaaagtgtggcagtcgctcgcacgtgccgaacccatagacgtgtacccgctcctgcgtccctttgcgctggggctgtgcatcatgttttttccaactttcgtactggggactatcaacacggtattgtcgccagtggtgaaagggtgcaaccagcttatggaaacgcagactttcgacatgaacgagtaccgggcgcagaaagaccgactggaatatgaagccctgatgcgaagccccgaaacggcttacctcgcatcggacgaggaatttgaccgacaactggaagaactgggctggtcgccctccgacatggtgaccatgacgggcatgtacatggacaggacggcttataatataaagaagtccgtccgggactggttcagggagttattggaaatgctctttcaggcggcggggctgattatagacacgctgcgcacgttcttcctaatcgtgttaagcatactgggtccgctggcgtttgcgatttccgtctatgacggtttccaaagcacgctgacccggtggatttcacgctatatctccatttacctgtggctgcccgtgtcggacttgttcagcagcgtgctggcacgcatacaaaccctgatgctccaaaaagacatcgagcagctttcagacccggatttcatcccggacgggagcagcaccttgtatataatctttatgattatcggcatcgtgggctacttcaccattccaacggtggcaagctggatagtgtcggctggcggtacgtctgcctataaccgcaacgtggcacgagctgggtcaatcgccggggctgcggtcggtgcggcaagcgggaaagtaaccgggaaactactcaaataaccaacatcaatatttagtatatggaatttaagtcattaacgaacatcgaaacgagtttccggcaaatccggctctttgcgctggtattcatctgcctgtgcgcactggtgacgggctttgccgtgtggaactcgtacagcttcgccgagaagcagcggcagaagatatacgtcctcgacaacggcaaaagcctgatgctggcactctcgcaggacatggcacagaacagacccgtggaagcgaagtcgcacgtgcggcgtttccacgaacttttcttcaccttatcacccgaaaagggggctatcgaaagcaacatcaaacgctcgttgtttctcgccgacaagaccgctttcaactattacaaggacttggcggaaaagggctactacaaccgggtgatttccggaaacgtcacgcagacggtggagattgacagcgtgaagtgcgacttcgaccagtacccctacaaggtgaacacgtatgcccgccagttgattgtccgggaaagcagcctgacggtgcgaagccttgtcacctcgtgccggttgcttaacgcaacacggagcgacaacaacccgcacggcttcatcatcgaagcgttcaccattaccgagaacaaggatttgcagaccattaaaagatagccttatggaaagaaaacgaaattacatcgaaaaggtgcaggactgggcagacgaccgcctgcgccgaatgtgcggacggattacgccgggcaaaaggctggcggttatcctcctgatgttcttctttttcggcggcttgtctatctacatcaccgtttcatcaatctacaatatcgggaaacgggacgggcaaaggctgcaaatagaacacatcagacaactgccgttgcacggcaatgacacaaccaaaagtatcaacccgttaaacagaccgcaatatggaagacgtacagaagaatgagaacggcacgaccgcacagcaggcggacgggaagccgaaaaaggaaaataagcccaaacgggaacttaccccgcagcaggtgcagcagcgcaggaaaatgatagtcttcccgctgatgttccttgcctttgcagggtgcatgtacctgatattcgcaccctccggcaaagaggacgtgaatgtggaaagcgtgggcggcttcaatgccgacatacccctgcccgcagaggacgggattatagccgacaagcaaaaggcttacgagcaggcggtgacaagccgcaaacagcaggacaagatacaatccttgcaggacttcggtttcacgctggatgatgatacggaagaaccacaagaggaaatcaacctgctgccggaagaagatccgaagccacaaaggggcggcggtgcttcttcaagggcggcttaccgggacatcaaccgccagttaagcacgttctacgaaacgccccctgtggacgaggaaaaagaggaattgaaacggcaggtggcggaactgaccgaccgactgaaacagcagcagaacgccacgcctacggctgacgaccaaatggcactcttggaaaagtcctacgagctggcggcaaagtatatgaacgggcaggacggacaaaggggacagattgcccaaataccgacagccgggcagaacggcggcggtatcggcactccggctattccggtgcaggctatccgggaaacgaccgtttcgggattgcagcagcccatgagcgatgccgacttcatccgggcttacagccagccacgaaactacggcttcaacacggcggtaggcacggggtacgctatgggaaagaacacggtagccgcctgcatacaccaagaccaaacgctggtggacgggcaggcggtgaaactccggttgctcgaacccatgcaggcgggaaatatcgttgtgccgaagaatacccttgtggcgggaacggcaaaggtgcagggcgaacggctcgacatactggtgtcctcgattgagtacgctggcaacatcatcccggtggaactcgccgtgttcgacacggacgggcaaaaggggctttccgtcccgtcctctatggagcaggaagcgttcaacgaagctatggcgaatatcggaagcgggctgggtacaagcatttcctttgcccaaagtgccgggcagcaggtggctatggacgtgacaaggggattgctgcaaggaacgtccggctacctcgccaagaagttccgaaccgtgaaagtgaagctgaaagcaggctataaagtcatgctgtatgccaaacaacaataaccattttatcaaccgttaaaatttcaattagcaatgaaacagatttttggattgttcgccctcttgctgggcgtgtgtgcggcaaacgcacaaaccgctgacaccgtgaagtatgcggctggcaacgacttgtaccgggggattacccggaaactcccgtaccgccaaatggttacgccctacggcgtggaagtgacctttgccaagacggtgcatatcatcttccccgccgccgtccgctatgtcgatttgggaagcaaccacatcatagcgggcaaggcggacggtgcggagaacgtaatcagggtgaaagccacgacagagggctttccgggagaaacgaacttctccgttatctgcgaggacggcagtttcttttcgttcaacgccaagtacgcccgtgaaccggaaatgctcaacatcgagatgaaggacttcttggagaatgaagatacgtccgacttctcacatacccggatgaacatccatttccgggaactggcgggtgaaagcccgctattagtgaagctgataatgcagagcatctacaagaacaatgaccggaaagtgcgccacttgggtagcaagcgtttcggcatacagttcttaatcaaggggatttacacctataacgggatgctctacgtgcacacgcagacaaagaacagttccaacgtgcctttcgacacggacttcatcaggtttaagataaccgataaaaaagtgcccaaacgcacggctattcaggaaacggtactggatgcggtacgcagctacaacgaggtgatagagattgccgggaaatcgaccgtgcgcacggtgtacgccctgccgaagtttaccattcctgacgacaagctgctggtcgtggaactctacgagaagaacggcgggcggcatcagaccatacgggtggaaaacgccgacatcgtgaacgcagaagtgattgacgaactaaaaatcaaatagggaatgaaaagacacatctttataatgatgctctttgcgctgtgcctgacctcgtttcaggcacacgcacaaagatacctgccgggcatgaaaggcttgcaggtcacggcgggcatgacggacggggtgcattggaacgctggcagtgatttcgcctaccatatcggggcggcgtacagcgtttacaccaagaacgccaaccgctgggtgattggcggcgaatacctgcacaagaagtatgactacaaggatatgcagatacccgtagaacagttcaccgcagagggcggctattacctgaaattcctatcggacagacgaaagacctttttcctttcattgggcttgtcggctctcgccgggtacgaaacaagcaaccgaagcgaaaagctgctgccggacggctctaccttgctggataaggactgcttcatttacggcggtgcgctgacgctggaactggaaacctacctgaccgaccgggtggctttgctgttgaacgcaagggaacgggcgttgttcggctcggacataggtaagttccacacgcaggtatctttgggactgaaattcattatcaattagcctatggtactgctggaattattttcgggcattggcggtttcagcaaggggctggaagccgccggatatactttcgacaaggtatatttttcagagatagacaaacacgcaatcgctaacttcaaatacaattttccttatgcggaacacatcggaacagttacaaatatcggggaagtcggcatcgaacgtccacacattgtcactttcggaagcccttgccaaaattttagcgcaatcggggacggaaagggactgcaagggggagaaagccaccttgtcagatatgcagtcgaagccgttaggcgtttcagacctgacgtttttatatgggagaacgttaagggaatattcttcgcaagacatcgcccggatttttggagcattgtcaaagcgtttgccgacattggcggttatagacttgaatggcaactgtttaatacggcatggtttctaccccaaaatcgggagcgaatgtaccttgtcggacgtgctgcaaagaaatgtaccgcagacatatttcctttcccggcgccgggtggaatgtatggtaaggtcgggggtgatgaacccgctgctcgtccaagcggaactataacaaggaactacggcaggcagcccaacattgggaattatgtcttgtgcctgaaaaaaggcgaaacctataacggcaagctgacagcaagccagctttcacaagtacgtatgcttacggaagtggaatgcgaaaggctgcaaggctttcccgacaactataccagatacgggatatatgacggagagaggaaagagatagcgaagatacaccgttatgccttgctcggaaatgcggtcagtgttccggtcgtcagggaagttgccgcccgaattaggcaaacgactactttattttgataacccctatatataatgtatatgaagaatgtaatgtataaaatcatcatgggctgctgcatcgtggccgcccttgtacttgtcaccgcctgtaatgacaacttggatattcagcaggcgtacccgttcagcattgaaacgctgccagtacccaaaaggctgaaagtcggggaaaccgccgaaatacgttgccaactggtgcgtggcggctactaccagccgactacctatcagataaggtacttccagccggacggcaaagggaagctggaaatggataacggcacggtgttcctgcccaatgacttttacccgctggagaaagaaacattccggctctactacacctcggcatcgacagaccagcagacgattgatatttatatcatcgacagcttcgggcagatgcagcaacttacactatcatttaataatgacaacagcgaagaagaaacggaaacaataaccccctaataataaaacgacatggtaaaaatagaattggatatagaaggtatctcgtggtacatagaaaccacgttggaaacagatacagttccggcagtaggtgacatcatcattgtggacaaggactgtatttccgaacgtgacagtgctgaattatggaaaacgccgtccaatcaggttttcaaatgggcggacgaagaagatgatgcgcccgtaatggtatggttcgattgcgacacggaaatgcttgtcaataaacggacatggaaatatgacatcgaggaagaagaaaccgtgtgcatacttggggtaaaatttattcactatgaggatttatagttgcgacatccgtttttatcatcctcttgggaaaccgggtatggaatgatacgcaaagcgtaaatatcgggcagacagcccgccgggaagcatcggcgggctgtttccatgatagggaaaacgaaaggcttctttgttactttcttcacccgctggcaggctcacggaagaaagtaacggcggcaagcagccgccgtcctctatcaactggttttaaggctctttatggacgtgtatttctctaaccacacctttacctgctccatgttatattcgcccgtgatgattgccgtatggtcgtctatggctacaaaccggacactttcatagctgtttacccagccttgcagggaacagacgccccacgtttccacatctgcaaaaacactgcggtctatccggctgattggctcgccgaaaactaccgtcattatctgaaagtccggtttgtcctccaacagttgcaaatgatgcaacgtgccgaactcgtctattttgcgcccccacgcccacacatcattatacaaatcatcgccccactggtgcgggtggtcgaaacggactttgaccgctatggaatgctggtcgtcttggatgtcctcgataacgcccgttaccattaagcccgtaaaaatgcactcgcaacgcctgccgataagctccttgtttacttctgtcgttttcatgtccctaaaatttacttgtttattactccgttcttcttcgctacccattcgtcacgcctgcggcggcactcgtccagcgttttggctaccgtgctgaaaagttcgccgtccgtgtggcggtagtcatattgataataaatttgtcccctgaaagcccccaaacggcatttcacgaacttttcttctcccggtgtttgggtgatgcttaccccgtttttgttaagtgactgcatgatgtcttatttttttatggttataaacttggttgttttaagcgggcagggctttgacaccccgcccggattggttgttatgccgcacggaacacaaagccgtcatcaaaccagtactcgcacatgaacaggtcacgggcaaactgtttgtaatcgaaataggtctttgcgaactccggcaggtcgtaacattcctctacaatttcataggcgaaatcttcttcatcgtcatattccccttgatattcatccaggaaatcccgtacaaggtcgtccgcatcttcctcgcccaaatcatggcttttatagttgcaccacacgaaaaaggcttcctgctcggtgtcgctcaaatcctccaccgcatcacgcagggcgaagaagttttcagaaatccagctttcgtcgattaagccctccggcacgttctcccagtcctgaaacatgtattccgcatcttcctcgtccttgtgaagttcccggcaggcttcataaaattcttccttgtccgaatagtccgaaaggtcgagccatgcgccggacaatgaaccgttgttgtacttggcataagtgcctacataaacttttgcttccgataatacctttgcttccatattgctgtaattttttaagtttttaattttatgcggatttgagaggtgagggagttgaagtttcactgaacttttttcctgtttcccgtaaatccgactttttttttatgcgtcttccggtcgggtcggtcgttttcgtttcacataggcttgggaagggtagtgtttagagtttgcaaggttttgggcaaaaaatacctcgcaaggcagggaagattttttcgccaaaccggaacggctcgaccttgcaaaatcgtgaagaacacgtaactacctttgcctattgaaatgattaaaacgactgtcccggctgggggactgcgtaagaggaagatttacagatagggaaaccgggaaaagtgcctgttctctttcatcttttagggaacactccatgcgggcgggaaaggcaagggtgttgtgagcttgcttgcaatacgcttgtgcgggtttccaacggctcttttcacgaaatacagtcagccatgccacgcacggctggcgtttcggggaatgtgccagttggaaaaggatataaaaaatgcgggtagtcggtggactgcccgcaaggtggaagaatgtactttattgggatatagtttgttaggcggaatttcgttaccgaaatcgttacctattcgtttttgtcacggttataggtaacgaaacctaccggacggcgttctttctgttgtttcgactggcttagaagctgggtaagggcttggtacagttcgttgaactgcgcatcggtgcttacctccagttcctcgatgcgccttgacagttcctcgtaaccgattgccatttggcgcatgaggacaaaagcccgcatgattgaaatgtttacttctatggctactttggagcggagaaccgaagaaagcatggctacgccctgctcggtgaaagccataggcatagcaacgccgaagttgtaatcagggggtatcacattttgtgatacccctatggataacagcaagttagcttcctcttgggtgagtacaaacataaaatcacccggaaaacgctcgatattgcgcttgaccgcctgcttcaaggctcgtgtttccacttggtagagttctgccaaatgataatcgagcatcacccggcaacctctgacctcaaaaatcttgttttggataatctgcaaatccataatcgtatattttaggagatttagcaatgtcggaataatagtaaggactggtcacaaattgtgaccagttcccaataatcaagattacatggcgacttccttgtaaatcttctcgatgccgacaaacttcttgtcaagcccctgcatatcgctgcctatcttgctgttggtgatgcgggcgtaaatttgcgtggtttctatgtttgtgtgtcccagcatcttggacaccgtttcaatgggtacgccctttgacagcgtggtggtcgtggcgaacgtgtgccgggcaaggtggaatgtcaggttctttttaataccgcatatatcggcaatctctttcaagtaggcgtttagcttctgattgctgattacgggaagtatcttgccgtccggcaacttgcccttgtacttcttcaaaatcatcttgggaatatccagcaggggaacattcacgtccgtattcgtcttttgccgcttggtgattatccaaaggttaccgtcaaaggacttttggatattctcctgccgcaagttggcgacatcgctgtaagccaaaccgcagaaacaggaaaagacgaacaagtccctgacgtgttccagccgttcggaaaccattttctttttaaggatgatttttatctcgtcctccgtcaagtagcccctatccactttttccagcctgattttgtagctggcgaacgggtcacccaccagtatgccgttgttgcgggcaatgatgatgatgcgcttgaagaactgcatgaacttggcggtggtgttgtaaccgcacttgcaggcggtacgcaaatacaactcaaaatcggtaatgaacattgggcttatctcctttatggatatgtccgatacgttgtacttgctttggataaattcagcgaggtggcggcgggtcacttcatacttgcggtaggtcgctatcgtcttggatatgcccacaagctgcttcacatcgtcattgtgcttttggaacaatgaaaggattgtttcgtggctctcgctgtgtcccaagaactcgttcttcactttctcggcagtcacgtagttgtcacgccgctgcatttcgtggtaaatggtgttcagggaagaacgtatgtcgtccagcagggcgtttattcttccggcatccctgcctttggctttgcctgcggcaatgctccagttgtcgggctggatgctctgtttcgtactgaactggcaaagtttgccgtctatggtgatgcgtgccataatcataacctcgccgtttttcttttcagaacctttcttcaaataaaaaagaaccttgaatgtcgatttcataactcactttttttagttgcaaaattactttttacctctcgtttttgagttatgcagactatggactaatcaagtcattatcaggtcatttatggacaaatcgttaccgtttttgtccggcagggaataggtaacgatttagtaacgaaactttgtcttttaccgtacttttgaagtcttggaagcaggactttcgggcaataaaaaaagccacaaatcattgatttgtagctttttgtccgtttgctgaccatttctgtccagcacgttcagcggagagacagggattcgaaccccgggtacctcgcggtacaacggttttcaagaccgccgcaatcgaccactctgccacctctccaaaacttcttttcagaagtgctttttgttaaaagcggtgcaaaggtacgaagatattttaaacatgcaagagttttcacgaaaaaaacaatcgaaggtttccaaaagatagcaatatccaggtattttatgttgaaaagcataaaatagggcatatttatgccgattatatgaaaaatgattgtaactttgtgcgctctaaagaaaaggataactacaacctctaattttatcatttatggaattaaacaagatctttaaagacggtctttggagcaacgaaatcaacgtcagagatttcgtaagtcataacatcactccgtactacggagacgcttctttccttgaaggacctaccgaacgtacaaaagccgtatggaaccgttgccttgaagcactggcagaagaaagaaaaaacaacggtgtccgctcgcttgataacgctactgtatctaccatttcatcacacaaggccggatatatcgacaaagaaaacgaactaatcgtcggtctgcaaacagacgagcttctgaaacgtgctatcaagcctttcggaggtatcaacgtagtaagcaaggcttgccacgaaaacggcgtggaagtggacgaccgtgtgaaagatatcttcacccactaccgcaagacacacaacgatggagtgttcgacgtatataccgaagaaatccgttcgttccgttctctgggattcctcaccggactgcccgacaactacgctcgcggacgtatcatcggtgactaccgccgtatggctctctacggtatcgaccgactgattgaagctaaaaaagaagatctgcgcaacctcaccggtccgatgactgacgcccgtatccgcttgcgcgaagaggtggcagaacaaatcaaagccttgaaagagatgaaagtaatgggtgaatactatggactcgatttgagccgtcccgcatataccgcccaagaagctgttcaatgggtatacatggcttatcttgctgccgtaaaagagcaagacggtgctgcaatgtcactgggtaacgtttcttcttttcttgacatctacatggaatatgaattgagcaagggaacgatcaccgaatctttcgcacaggaactaattgaccagtttgttatcaaactacgcatggtacgccatctgcgtatgcaatcatacaacgatatctttgccggtgatcctacttgggtaaccgaatctctgggcggacgcttcaacgacggacgtaccaaagtgacaaagacttcttttcgtttcctgcaaaccttgtacaacctcggcccttcaccagaaccaaacttgaccgtactgtggagtcccgaactgccggaaggattcaaagagttctgtgctaaagtatctatcgacacttcttctattcagtacgaaaatgacgacctgatgcgtgaagtacgtcaatctgacgactacggaatcgcctgctgtgtatcttaccaagagataggcaagcaaatccagttcttcggtgcacgctgtaatctggcaaaagctctgttgcttgctatcaacggtggacgttgcgaaaacacaggtacagtcatggtgaagaatattcccgtactgaccagcgacacactgaaatttgaagaagtaatggacaactacaagaaggttctgatcgaaattgcccgcgtttataacgaagcgatgaacatcatccactatatgcacgataagtattactacgaaaaggctcaaatggcactcgtagatactaacccgcgcattaaccttgcctacggcgtagccggactttctattgcgctcgattcattgtcagctatcaaatacgcaaaggttaccgcccgccgcaacgatataggtctgacagaaggtttcgacattgaaggcgaattcccttgtttcggaaacgataacgacaaggtagaccaccttggcgttgacctcgtatatttcttcagcgaagaattgaagaaactcccggtttacaagaatgcccgtcctaccctctccctgctgaccatcacttccaacgtgatgtacggaaagaagacaggtgctactccggacggacgtgccaaaggcgttgccttcgctccgggtgctaacccgatgcacggacgagataagaacggtgctatcgcttctttgagttccgtagcaaaacttcgttaccgcgactcacaagacggtatcagtaacaccttctctatcgttccgaaatcattgggagctaccgaagaagaccgcgttgaaaatctcgttacaatgctggacggttacttcgccaaaggcgctcaccatctgaacgtaaatgttctgaaccgcgagatgctttatgatgcgatggaacatcccgagaaatatccgcagcttacaatccgtgtttccggctatgctgtaaacttcgtgaagttgagtcgtgaacaccaactggaagtaatcagccgtagcttccacgaacgtatgtaatcttatctactcttatatgacaataaacgtacattcatacgaaagtatgggaacattcgacgggccgggtttacggctcgtcgtttttcttcaaggttgcaatttccgctgcctgtattgcgccaatcccgacacgatagccggaaaaggaggtacacctactccaccggaagaaatcatccgcatggcaatgagtcaacgtccctttttcggaaaacgcggcggtatcactttctccggtggagaacctacgttccaggcaaaagcgcttgtcccgttggttcgcgaactgaaagagaaagggattcatgtatgtatagacagcaacggcggtctttggaatgaagacgtagagaaacttttccaactaacagacctcgtattgctggatattaaagaattcaatcctgcccgccaccagatgctgaccggaagaagcaacgagcagacaatccgcacggcaacctggttggaagagaacggaaaacctttctggctccgctatgtgctagtacccggatacagcgattttgaagaagacatccgacaattgggagaagctctcggaaagtataagatgattcaacgggtggagatccttccttatcatactctgggcgtacacaagtacgaagcaatggaacaggaatacaagctgaaagacgtaaaagaaaatacccccgaacaacttgaaaaagctacggaggtattcaaaaagtatttcactacggtagtagtcaattaatacgctttttcatccattcaatagatttacggttggtttcctcaaaacgccaatgagcggaaacaggagttaccacaatcgttttcggggctgtaattacattcaacgcggccgtcaccgtggtaggcggacaagtgttgtcattatagccatacgaataaaatcccggtactttaatcttttgagccaaattagccacatcataataagccagtgtccgacaggcaatgtcaatagatactggcatttttttcgttcggaagcagacaaaagtctcggccaccctccggcacgtccatgaagaaatcccgtcatatcacataatgcgggacagaatgaatgcagaaagaaatgtaatacgttcgtcaaaagcaacagtcacaaaactcagcgtcccatcttaacttccgcccgaactacgcttatctttccactggtcggacccacccaaataataaagacgacttagcgagagtaacccaagcaatatccaccaatgtcgacaagtttatagaaaagtttttcattaatatgtaaatcggatacctgcctgtatattgaaattaaacggattttccttgcggatagtctgtacgctcgaaccatcatcaaagaaataagcaacaccgggttccatgtagatacctatacgtttcgtcgcatttaactgtacgccgactgcaccagatacggagaattgtaaaggtttaacagtttccttctcggagcctagttttccatacacacatttttctatcataccgccgccggaaacgtagagagtgaccagttttttatccaaaaagttccagttggcacgcaacggaatgccgacataatgtagtttctgctccacttcctgattgccatccgccagttttacatccgaagaaagcagtgtataggtcaatccactttcaacagaaaaccctttacccaagcttttacgaacagacactcccacagaaataggctgatgatgcttaatgtcaatcacctgctttgcctgacgcagataaggtataccgtcttcaaacaccaatgttttatcttccggtatattcatcaagccgttagaaacagcagccatacttactcgagacagatattgggtacctccccctacctccgtcgaagcacctccggaatttccgacggcaaaccccattgaccaagttcccttttgagaagatttcttttctgtcgggatatgatatttatctctactcgaaggacggcgaggtctgttgtttctaggttcttccgtttccaacgcttgctttttttgaccagcattcgcgtctttcactagctttgtcttctctttttctccattatcaatcttatcatctgttgccggaaactcatcttcattctgaataacagattgatcggtatacgtattttgttcggaaatattgtgttctgttttcgccagtctatctgtctttagcataggacgcgacacaggatctgccgttgcaccttgcgcatccggctgttgcaccgcaggcaatgcgtccggtacggaagccaatgcaggggtttgcgtatgacgtatttcgtcagcggcaggcgtacccagaaaatacaggcttacagaagaaaccaaagccagtaatataacagccgcagccgccatcatccatttccgataaggatatatcttcctctccacaggaggcataagctctttctccagttgttcccaaccggaagccggtatcggctccgaataatcttcgagcttctccttcaacttattcatccataattctttctcttccatatctatccattattcattatccattcttttactctttttgctaacacgcttttcgcacgaaacagttgcgaagccgacgatttttcattaatgcctaatacctgagcgatttctttgtgtgatttatcttcaaacgtataaaggttaaacactgtacgatatcctgcgggaagttcttcgataaactgcatcaatactctttgtggtatcgcttctacatccgaaacatccggttcttcgtacttctcgggcaattcttccaaaggcgccgactgattcattacatcatttttccgaagatattgcaaagccgtattgactattacccgctccatccaggctcgtaaggagccttcacctcgccaggtgaacttgtcgaaagaatcgaatatctttataaagccgtcgtgaagcagatcctgggccgtatcacggtcgccggtataacgaagacagatgccaagcatgcgccccgcatactgctcatacagttccttgcgggcctgattgtttcccagcctgcattgttccgacaactctaattcttccattctcttatacacgtgtttatcttataaatgcagcaaagatagaaatactgcatagagagaacaactcttttagtacttttgtttctttaacagattcgaatgcaatattttctgcctccccgcattttcaaaataaaaagcaattatattattaaaatccataacctattatgtatatgaagaaattaaaattcattaccttaactttagctatcataatcaccttaccgatgctgcaatcgtgcctggacgacaatgatcatcaatcgcgttcattggttatcagcactatcaaccaaatcagtgaggatagcaaagaattttatttcactttggataatggaaagacgatgttcccgagtaattcgcaggcatggggaggcgagaaatttgaaaacggacaacgtgcctttgttatattcaacgagctggagcaacccgtaaacggatatgactacaatatccaagtgagagatattacgaaagtgttaacaaaagagatcgtcaccatggacgatgaagaaaatacagaagaaaagatcggggatgataaaataaacgctacttatatgtggattagtaaagataagaagtatctgactatcgaattccagtactatggtacccatagtgaagacaagaagcatttcctgaatctggttatcaacaataaggaagctgattccgctgccgaaaacgaagataataccgatgacgaatatatcaatctggaattccgtcacaacagtgaaagagattctcccgaccatttaggcgaaggatatgtatctttcaaactggataagatagaagaacagatagagggaaagaagggactgaatatccgtgtcagaactttatatgacggaataaagaattataaagtacaatttccctgatttattaattctgcgtgaaaaacactcttttttaatataatatattaattacgcaaaaagagggcggtagttgtgaaatgaagtgaccccaaaaatttggactggttaaacattatccagttatagaaagagttcggtattgtactggactctttccttttaaccgggacttgattcttttattattataataatctatatattcttccaaagcctttgtgaagtcttccggagactcgaacttttcagcgtatagaagctcagatttcataattccgaaaaaattctccatcatagagttgtccagacaatttccctttctcgacatactttgaattatatgatgcccttcaagccttttccgatatccgaagtgttggtattgccaaccttgatcagaatgaagtacgagtccgtcaaggttatcacacttatcaaatgctttatcgagcatgtcatatatttgttcaagattagggctgttagatatgttatgggaaataatctcaccattcaacatatcaagaataggcgacagatatagtttcgtagcccctatatttatctgtgttacatcagtcgcccatttacggtttggctcagtagcaacaaagttacgcccgattatgtttggggcgagactgccaacttctcctttataagaacgataacgcaccttgcgcatcttgcatttgatatgcatttctgtcatgagacgctgcacggtcttgtggttgatgacataaccacggttccgcatctcccaagtgacacgtctatagccataacgtcctttgtgctcatggaaaatggatttgatttcttctttctccactgcgtatttatctggttcctcaagccgtttcagatgataatagaatacggaacgagccatctttcttaactccaataataagtcaagaggatattcggaccttagttcgtcgatggcttctgcccattgagacgtgcccgggcttcctgttcctcgactaaggccttcactttttttagtaacgcattctctgccctcaggcgcaagttttccgcctgaagcttttccaattctgtctgaggttcttttttcttaggtcttgccatagtttgagaaggtctgcctttacgtctaaatatatgtaattccggatatccatgtttacgaaccgtacgaacccagccttcaagtgctgtacggcttatacggtactttatcaatgcatgggacaaaggtaatcctttttccaatatctcgcgtacaacctgttccttaaaatcacttgtaggctttatcttggaacgttttcttaggatatcaaccccgtatctatcatataaacgtacccaatcgagaattttattctcgtgtaggttgttttcttttgccaactgtctaattggacaaccggcttttaccctgctcactatattgagctttttttcaaaagtgtatttcataaagaatgcaccccaaaagttttttgtctaacttttggggtgcacttcaaaactgtcgccctcttacttttattatataaacaagttatttcttatctccaaaataattccacaccaccgcactcaaagcagctcccacaaaaggtgcaatgataaacaaccacaactgtgacaacgcttcgccgccctggaacaatgctggagcaatgctacgtgccggatttacagaggttcctgtgataggaatacatacgatatgtaccaatacgagagacaaaccaatagccagtccggctaaattgcctgcccccttcttaggatcggtagaacccagtaccaccaatacaaaaataaaagtaaacacagcttctgctatgaatgcctgcaacatctctccttcgccaaagccgttcgaacccgtagccgtaggtccatcatgcgcaccggtagacaccaaagcaaaaagaacagccgaaccgataatggctccaatcacctggaaaatcatatacattcctgcatcttttccgttcatacgcccggtaaggaacactcccaatgtgatggcaggattaatgtgacatcccgaaattcctccgatagcatacgccatcgctaccactgaaagaccgaatgccaaagctacgccgaccgttcccacgccagcacctactgtacctgttacactaccggcaaaaacagcacttccgcatcccataagaacgagtaccatcgttccaatcatttctgcaatgtactttttcataactattatataaatggttgatttgccaaatataaagaattatcccaaagaaacaaaacgcatctacctaattatttgtatctttgcagcatttttgaataaaagactagcaaataaaatgaagaaaggacttttttacgccatattggcttctatcctatgggctattgtaaacccgtttatcaaacaaggattgagctatgacttcacccctatgaacttcgccggtatccgctttaccactgttgggattattcttttcgcttatacctggcacaagggtatgtggcgggaaatccgtcaacacagtaaactgttcctgaatctgattcttatcaatatgtttatgggatatactgctttttacttcggtgtagactttgtaagcggagctatatcgtccattattatgggaatgacacctttgattaatgtcctgttagcgcacttgctcgcaagtaatgacaaactgaacactcataagattatcagtcttattgtcagcctcatcggcctgttcctgattatcggaatgggaagcaacggtgcaccactcgactggaaaggaattacgggaatcgtacttttactgctaagtattatctttcaagggtattccgctatctccgtttcagaagacaaaggaaaggtgaatcctattttcctgaatgcggtgcagatgttcttcggaggtctgcttatatatatggtgggcttgggcacggaaggttatcattcttttatcggaaaacccggcggattttatgccagccttgcgatactggtattcatatctgtattcgccttcagcttctggtttatcgctttacaaagcaaaggcgccaaagtcagcgacatcaatatgtgccggttgatcaatccgattctgggtgcagtccttagctggatcatgctccctgacgaatatccgacttttagtaccgttgcaggaatggtcgtgatcgtcagctccttgattatctatttcaaagggaccgaaataagtgaatggttcaagaaaacaaaagccggagcatagaacaaaccccggcaaacataatagtccgacaaatatcagtatcagctcacaacaaacattgaatagattgtaatgacaacatttctttaggaactgccgcctttatttcttctttcaaaacagataaaaggctgtggcgaataaaatctttatttgtagccagcaccacttgcctcgtaggccgaggaatggcaaacggacgaacgagttgccgttgttcctctgtcaactgtgtcactgccagttcgggaataaaggtaatccccttcccgctttccaccattcgcataaacgtttccatacttcccagccgataagccatttggctgactttcaccgcttccatttggcaaaaacgaacaagctggtcacggaagcaatgcccttcatccaaaagccagagacgttcgcccgttatatcggaagtacggattacttcatgcttgaacgacggttctttgcgggatacataagcatagaattgctcataaaaaagagtttcttcggtcagaaatgagtcttccaatttgctggctataattcccgcatccagatctccggcgtgtaatgcctgctgaatatcctgcgttttcatctctgtgacgcgaatatccagttcgggatatttctccattaattgaggaaagaaacgcggaagtaggtatggagcgatagtaggtaatacccccaaacgaaagacacctgacaacgactgcttatcttcactgataatatctttcacttgagctgcctgcgccagaatcacacgagcctggtctattactttctgtccgatagttgtcgggcaaacaggttgcactgtccggtcgaatagctttacgcccagttcatcttccagcttctgaatcattgcactcaaagtcggttgtgtcacacggcaatattcggctgcccgtgcaaaatgtctgaactgatcaacagccaatatatactccaattgttgtattgtcatctatcaaatcatattaagtcatagatttcttctatgcaaagatagaaattttcagtttgacaacaagcattttccgccttatctttgcaatacagaaaaaaggaaacaagtataaatcattaaaaataaaaagaatatgaaaactttagaacttatcaaattgaatgaatcaggagcaaacaacgtagtagtatctttgcaacaactcttagctgacttccaagtgtattacactaatctccgtggtttccactggaatatcaaaggacacgacttctttgttctccacagccaattcgaaaaaatgtatgatgacactgctgaaaaagtagatgaaattgcagaacgtatcctcatgctgggtggcactcctgccaataagttcagcgactacctgaaggttgccaatatcaacgaagtagataaaataagcaacggcgaacaggcactaaacaacatccttcagtctatcagctatctgatcggtgaagaacgaaaaattctttctattgcatcacaatccggagacgaagttaccgtttcgatgatgagcgattatctgcaagaacaggaaaaattagtttggatgttgacggcttataatagcaagtaacttgataataaggatttaagttttaggtaagaaagagagaaaacctccataacaagaggcattctccctttctttattataagaaatcgtcaaataaaaacacacacagagatcgcagaaaatatgaatctcagcgtgaaatctatcaaccggtacaaacaaaaaactatggaacttttgcgaaatgcactgaaagactacttaccgttgctcctcctgttgttattacgtgcatgatttctcctcactccagatatatgcttatcttctgagaaacacccgcatctgatatgtattatccctattgtttatacgactttgcctaacagttagcaaaggctcactaatgtaagcaaataggctaacatctatgaataaattaattcacggctgtaaacaatcttattcactaatgtgagcctttacaaaacaagaagtacttgcctaagaatccctaagtatttgcatattatatacaaagggaaacagggcaatcccaccggaatctggacgaagtactatgagggtaaatatatactctcaggcagctatcagcagttaccctcatagctacaagtaggatgaataaagagattgtgccaattagtgagggtatgagggtaaaaacgtcactaacttttttctggctaagtcggaacattccgcgcgattgacctttccgtttcccgtttgcggtatgcaatccgttgtcagaatatacttgggacgataatagggtgtcaatattgtctgtaacctgttttctatttcttcagtatccgcccgtccttctattaataaggtcacagcctgtcccaatcgttggtcgggcactgaagtaatgacaaacggtacggaaataaaaggacggagcagcttctctacttcttccgcctggatttttattccgccactattgataacattatccttgcgccccaggataatgaaacctttatcgggatagattcgtgcgatatcattcgtctgtaatactccgtcacaaaccaaaggggcgtcaatcaccaacgtgttttcaggagataaagacagatttaccgaagaaaacgggtaataacgttcggaagcagctgttccgttgagacggcggagggcgatatgagacaaggtttcggtcatgccataagtagaatagacagctcccggaagtgactttatttctgtttccaaagcctcatcgatcgctccgccacctatgatcagaatctccgtttgcttgagtcgttctttttcttcaggagtccgaagggtattataaacttgcaagggaaccattgctgcaaatctcaaaggctgtttcacatccgacagcggatgaccggaagcgggacgcacaatgagatccagtcccgcaaccaaagcacgcaccaccaacatcatcgcgccgatataccggagattcatacataacaatgccgattctccttgctttaagttcagaaattcacaagtcaagcgtgcactttgcatcatttggtctttacgtacaatcagttctttgggcgtacctgtggaaccggaagtatgaactgttatgaccggagaatcattaaaccactcattcaggaaaaggtataaatcccataaagcagaaggagtattttctgttccttctgctataaaccgggctatatcttcaggagtatattcttttccttccaatagcaaatgttgttgttgtcggtcgaatatcatcggatattattaaatagcatcattacaaaaccacaggcaatcttttcttatttcaagaggcatttctacattatccgtaaaaagtaatcctgttcccaagccctgcggtaacggattatcaaacgtagcacaccactgggcgatagcgttcagcccgatattcgactccagagcggaagtaatccaccagccaatctgccgtttctccgcctcggatatccattcgtttcctccgcatactcctccatgaagggaaggtttgaggataatgtattgcggacgaattgctgaaagcagtttttgttttccttccagtgtattgcatcctatgagttcctcgtccaaagcaatcggtaagggagattcggaagtgaggcgtgccatttcttcccattgcccggcacggataggttgttcgatagaatgtaagtcaagttcggacaggcgtttcagcttttccattgcatccaccggagagaaagcaccgttggcatcgacacgcagttcgatttctttagaggaaaagcgggtacggatatgacgaagcaatgccaattcttcttcaaagttgatagcaccgatctttagtttgatacagcggaatccggcctccattttcttctctatctgggaaagcattttatcaaagtctcccatccagataagcccgtttatcggaatccctgcctcaccacgcgagaaagccgtatcgcataatgcccaacttcctgcaaagaagtgccggatagccgtttccaaaccaaacaggatagagggataatcacacaaagagtctacatccagccttccctgccgttcttccaaccgacgacaggctttagccaggataacttcataatcgggaaggtcgtcacaactcaatgcgggcaaaggcgcgcactctcctatccctaccctacccggaaaatcaggagacgtcagatgaagataccagactttacgtgtcgtatatatgcctcgggaagttcctgccggttgcctgaaatgaagcaaccggggaataatttctactttacagtccattatgaatgtcaggggaacttaggatattgtttaaagttcggtttgcgtttttccagaaacgcattctttccttcctgagcttcatccgtcagataataaagcaatgtggcgtcacctgccagttcctgaataccagactggccatccagttcggcattcagtcccgctttaatcatgcgcagagccaacgggctgagcaacatcatttcttccgcccactgcacatattcatcttccagttgttccaacgggactactttattgaccagtcccatatccagagcctcctgtgcagtatacttccggcaaaggaaccagatctcacgcgcttttttctgtcctaccacccgcgccaggtaagaggctccgaatcctgcgtcaaagctgcctacacggggaccggtctgtccgaagatggcattttccgaagcaatggacaagtcgcaaaccacgtgaagcacatggccaccaccgatagcaaatccgtttacggcggcaatcaccggtttcgggatactgcgaatttgtttctgtacgtccaatacgctcagacggggaataccgtctttaccaatgtacccgccacgtcctttcacattttggtcgcctcccgaacaaaatgctttatctccggctccggtaattacaatcacatcaatgtccgcttcttcccgacagatacgcagtgcgtcgctcatttcagcagttgtggtcggagtgaaagcgttccgataacgttcacggttgatagtgatacgtgcaatcccattatagtaatcaaaaagaatatcctcgtattctctaatggtagtccattttcttggtgtagacataatctatttttgttttagttgatgataataatttttcagcatgcgggcatctttgtttttgttggtaaacacttccagcagcagaggacgttccttttcttccggttgggtgaagatttgcatggtttctgccagttccgcctcattctctgcttgcagataaagaaatccgcgttcttccgcccagcctttggcagaggttttatgaacagcagcaatgaatttatgggatgtccccgacatatccaatccccgcaacgtatggaagatttcccctcctccgttattcagcaaaaggatgcgcagattgggacggacattcacattccacaaagcattcatgtcatagaagaagctcaaatccccgataactataaaattcagcttgtcggaagcagccgcataaccgacagcagtagaaagcgatccttcgataccactcgtcccccggttacaacagatttcgacagtggaaggaacggaatacaactgtgcatagcggatcacggaactgttcgccagatgaagtgcacatgattccggcaggccttttatcaatgcaccgacagccgccatttccgaatacgcaaaatcgggttcggggataatcttacaatagttttcccacacacggggatattccggtgtacggttgtccatcaagcttgctattttctccagaaactcaaacgggtccatttcaatgactgttgtcaatgctccgtagaggtcgactatctcaccgtcaggagagatgtgccaatgttctttgggcggatgttgacgaaggaacttcttcagtcgtttggaaacaacgtgcccgccataggtaatcagtagttcgggagtcatctggtctatcttctcctcaggcattgcgtaaatcgccgcatcgaagtttttcaccggaatgccgggtacggtttgattaccgatatgttccgtcaaccaggcaaagtgtttatataataatttggtatgtttcttctcgaacagatagataagattcatctgaccgacaataatcattcgtttctgatatttattcatccggtcaatgaggtcattataatcgcggtcatacacgttcaacccctgataacgggtgattacacgcacttccggcaatgcgtccgacgtaaactgaaacagaggttcggaaataggaacgttgatatgtaccggtcctttcccatgatgtttcgtttccaacagggcttcgttcaccagacgattgcaataccattcatcttcttccgtatgaatctccgggaggttgaccgacttcttgaccagattctgaaaaacaccgggttgcggcaaggtctgtccatccatttgtccgatccaggcagcaggacggtcggcagaaataaccaccagaggaacattctgataaaatgcttccgccacagccggatgaagattgagcaacgccgtgccggaagtacaacagacggcagcaggtttgccgccattcaaagccagcccaatggcaaaatagcccgcactccgttcatccgtcaccggataacaggtaaagttcggatgattggacaaggtatgcacgagagggatattacgactacccggacataacacgactttcgttattccatgtgcttcgagaagcgcaaccagttggagtatgtttttcttgtctgtatacatagtgcagtgataagttgtaaagttatatattatgaggtgataggctgtgggtcgtgcagagaagaaggtacaataatccgtctcatggtttgcaacttcttttccgtttccagccactcatcgttcagctccgaggaggccaacagtccgccaccggcatagagagtgagttgttcttcttcgatgtgcatacaacgaagattgacgtataagtccgtacgcccatccgggtcgagccagccgataaaaccggaataataacggcggtcgtagccctcattttccagaataaaccgataggctgtatccttcggcagtccgcatacggcgggcgtaggatgcaacactttcaggaggtcacccaaacctttattgtcttgcagagagaatcggaaatccgttttcagatgcgacaaggcgccggcataagcaggatagggtccgttctccgtcgaatgaatccctaatgaaaggagttggccacggatgtaagaggagacgtattcctgttctttccgattcttctcatcccagacttgcggcagtttgccgtcttgcagaggttgggttccggccaatgctaccgtatgccagtcgtccttttcgcccgacaagatgatttcgggcgtacttcccaaccagatacctgtttggggagtataacataagtatatataggaatggatatagcgttggcaagccgcgcgaaaggctaatgaaggagaaaatgccgatggttttccaatagtaagtttacgggaaagcaccagtttttcaaaagtcttatcacgtaaggcactgataaatgtacgaaaacactccgcatattcctcggaacaggagggatagtcggttgacggaatatcccgcggaacggcgtccgcatcatctgcaagaagcaaaggttgccccggcccattcgattgaatcagcaaaatgggacaagtctcgttaggtcggaacggagcaatcacaaatcctctctgcccgtttagttcctgcaaatcgtatatcagacggactgccccctcctcctgtgtcaccaggcacggaattttctccccgggaatacgataaacggcaaacggttgcttccgttctataaatgcatcaatagttgtcaagttacttatttcttcgtcggttatctttttttcatcacactgttgactacccgtatggaagacaccagtttgttggttgaagtaaatacgtccacattccatacatgggacgaacgtcccttatgcacgattgttgctaccgcacgcaccgtgtctccttcgtgtgcagaagatatgtggtttccgctcacctgcattcccacgacaatctcatcgggctggcaaagaatcatcgaacctagtccggcaactgtctccgccaatgcaagactggctccgccatgcagaatgccgaacggctgacgggtacggtgatctaccggcatcgtcgcttccacacgatcttcagcggcatacgtatattggattcctaaatttcccattaaagcgtgacgcgcctgtgcattcagttggtcgagaggtatctccgccgcacgcacttcagctataattgccttttcaacagcaattgccactccgtcttcttcattggaagcagtcacatagtcagcacaaatcttcacggaatcctgcgagtgtcccatagctacgccgagtccggccagttggatcattgtcacatcacatactccgtcgccgatagcaatcacttcttcccgcttcacgtcgagttcttccaacaaagctcccaaagagttggccttatctatggcacaaggaacgacttccagaaaatatggctcggaacggaaaacatccaatgctccgttcagtcttcttttccaatgatcttccagaccgatcaacgcttcttcattatcgctgaccaacatacacttacagggtgcaaaatcaacagcggcagaaaattccgtttcctcgattatccgcagattattcagccgggcttcattttgaatatgttcattttcaggagagtccgtaataatcgtatcatcatgataagtgaataaggcaaaaccgtttttccgagctttcttttccagatacggcaacatctccggattaatccgccgttcgaacaggatttccccgttctgcgcatttataatctggcaaccattatatgaaagaataaagcctccatagtttccaagttcgagtgatttggccagtggcattaatccataggtaggtctgccggatgccaatacaatacgcactcccatttgctgaactttcaacaaagccgctaatgtacgcttactaatttctttcgcgtcattaaggagtgttccgtctacatcaagaaccaataatttatacttcatgattacacgattttgatttagattacaaaggtaggaaattgagtgaacgacagaaagagtaaacagataaaaattactttaatttcactctttcagatgcatttccagataatcccgaagtatccgggcatgattatagacaggttctttagacgcatacagcagtgtgaccaccggatgaggtttgataagaatcaggaaatcagccattgcgggagatgcggccagttctttttgatattgcatgacaaagtcgttccaatgcccgggaatatcttcgtgaaaccatttgcgcaaactagcggaaggtgttatatctttcgcccagtaatcgtatttcagccattctttcttcattcctcgcggccatagtttatctaccagcacccgatatccatctgtttctgaaaaatcttcgtaaactcgttttatcctaacctgtatcattcttagtttatttagttactcataataataaaccgagaaagacgaaaattgtttaaccgaaggatgtcgataaagttttttaaagcgactcttgcgcttttttaaattcataaggagtcattcccgttttcttcttaaaaagactgtataatatcggagcactattaaacccagcttcatctgctatcgcgcgtatcgtatagtgcggatgtgtttttagcagttgaatagcataatcaatacgcaactcgttgatatatccgttaaaattagttccggtacattcttttatcatccgggcaaaacgcgcattgttcaaatgaacgatttgcgccaagtcttctctcgacagttcaggagaaagatacaaacgatcttgaacaacgatgcgattcaattctttaaaaatctgtctattctcgtctttttccccgcttgctacttctgtgtcatcttcgtccgaagactcacactgttcttcttgttccttctcgagcaatctgtcttccagttctatttctgatgatatagcgaattgctcatattcctccgactgctgatcccttttttccttatcggcaagtttctcattgatcaacttagccaacattctgtttttatatttaatcgttttattgaaacgccacagacgccataagataaacaaggtcagcagaacgatacagaccatgaaagcaagtgagatattctttattcttaattggaaagcttgttgggcaatgtattcttctttctcagaagcaccgtacatcgcgttcaactccaatgccgcattgtttctatctctacaattaatgctgtctgttatagctaagatagtcccacggatcgctgcagcctctttatagtggtgcatacccagataagctttcacctcatgttgaagaacagtcagatattgttcattcaaagtatcttgttgagttctcatccattccttgaaacccttacatttctcaagagctttctcatactgttcggaaatcatcaaataaggaacagagtacatttttccgtccggtgtatgagattctttcttcgacaagtatttttgataatattgttccgcctgtgcattctttttctctacataataaatataggcaagttttgcatacaaataactatattgtccgtccacataaccttcgggtatttgaggtaatgcctccagccgctttataagcttttcacgctcaaaagcaagttccaaagcctctttaacacgtgaatcgttcattaaaaagctcatttctgctccataatagtaagaaagcaacatcatctcccgcattttatttgaaccgcgcaataatttaatagtacggtcaaaataatcatatgctttatctttaaaagataatctccagttattctcacctatgcagaaaaataatctggctttggcttctcgatcttccaactcctgtgccagtttaatcccactgtatgcataacgcatactttcattatacttgctcatcatagccgaaaattccgctagatgaactgtcattttcaacagatgcttcggatctttttgagatatagaatcaagcaaataagcttttcttgcatacataaacgccagtttattcatatacatattgctatatgacaaactacgcaactcattgataatccgcaaaggaattgcttttctattttctgcctcatccaataattgcaaagcacgtttaggctgtgcaatatagatactatttatatactcggcggtatatagcgaatcgtcacttactgtttcgtcagctctcagaatttggttatgcacaaataaaaatatgcagatacatacccctaaatgtatatatttcatattatgtctaatcatttacaattcaaaggtaaatgataatttcataaaatacaaaagtggattctattttaagaaataaaaataagaaacattagcattatgcatccgccaaaggcagataaaccgaaaaacaactaccttccccgacttccgaacttactcccaaacgtcccgacaatttttcaacaatgatcttgcagataggaagtcctaagccactcccctgttcaaactcatcactcttgtaaaaccgatcaaatataggttctattctctgcttcctgaactcctgttttatcagttcttcgaattttccatgacctatttcgtcttcagagaatgaatagacaagagaaatatattttttcgtctatgatttgagccgtacaatcttaggtgatagccactaaaaaaaggcaactaacaagcaaagagatgcaaaaatatacttatatttcaggttaacagctttcatgttttatttgtatgtcatgcaaatttccataaaacaaattcattttgttaataatatattcaactaattttcattacctaaaacttccaaaccaatatcctactacttttcgtcccctgatgcatccgtataaccttgtactccgacacctcgacagctttcaacttggcatatagcttatccagattcttctctttggaaaccaaactagtgaaccacccgcaatttttccggtatttccggctttcgacaatcatattcagcaggaaacgcaattcgccaccttcacaccaaagttcattcgcattccctccaaagtttagctttgccttttttactatctcccctttcaaactactcaatttgcgcaacgttccctcttccgcttcctctttcgaacgatgaaacggagggttacaaattgtcacatcaaaatattcatcgggagcaatgatgccttcaaaaatcttgctgctatctttctgaagccgtaactctattttatgagccagcaccggattacaagtaactatctttcgtgcattttctattgatatggggtcaatatctgaacctacaaacatccaaccatattctacatgcccaataatcggataaatgcagttcgcacctactccaatatccagacatctgtatgcagatttccgtatctctccattttccactttcacatctttgcttacagcttccgaaccaatcaaatctgcgatgtaatgaatataatccgctcgtccgggaataggcggacacaaatagttcttcggaatatcccaatatcgaatgccgtagtagcttatcaacaacgctttattcaacgccttcaccgcttgcggattgaagaagttaattgtttgcgtaccatagggattgagttgtacaaacttctttaaaggcggataattctccgtcaatagagaaaagtcgtattgcccgttgtgtttatttcttgtatgtagttcgcttctttctgacatggcggcaaagatacagagaatcttcctgtctgcaaattcttccctatatcttttcccgcactataagttatattgtttacagtaaccattttaatataggccggctgaccgaatcacaatcttttccaacaactgctgtgtctttccaatgctataaaagctgataaataatcagatacgaggtgaaagagtgaaaggatttttattccatattaaagcatcttagagggacctctctgatttatttttgttaatctatgacttgttatgtagcttgtatgagaataaaatactattttcgggattgaaaaatataaaagactatcacaaaatgaaaattacccgtgatgaattgctgatagcagcgttcaagctgtttatgtccgtaaactatgaaaaagccagttttgcagaacttggaaagatgctcggaatgtcgaaagccggaatattcaaatactacaagaacaaacaggaattattcattgccgtagtggataagttttgttttagcgcgcaaaacccacgaaacaaattcactgaaacgaacggtacgtttgccgaatttatagatgaatacgtgaaaggcgtacaacgaacaatggatatgctgagtaatctgataggcccaggtagtgataaggtggtacaaggaaagttttcatatcatgcccaatattttcattttctatttcaacttctccaatatgaccctaacgccaaagaaaagctccataatcttatagtcggtgattatgcttattggcgtaccgccatacagcgcgcgataaataccggagaattgagaaaagatgtggatgtagaagatgcagtagttatgttccgacaagtttacatggggctgtcctttgaaatgtcttttctcggtggactggatacggaacgtcttgccaaacatttacgcgccgtttactccttattgaaatgttagatagtgccgtccggcacatattccttacctacttgtctgttggtgcaaaaaaatataaaaaagggatcataggaaaaaatctggcatattttaattaggaatcacaccattttacatacataatagtaaaagcatactatttgcaaatatggttcataattcgctttatttcaaactataagaatttgcagattttgttttttacttgcagatttgacgtttttcgcccaatttatccccccatctatccccgaagtaatactttttcctcaagggatggaaaaatttcatcggagatggttcatatatattctttttatcatccctttttcaaaggatattaataagccagccccctataattcttgacatctgaagtaatacagcaaaatggaaatgcaataacatatcgttttctataagtaagtttaatgtgggctgtcaaatagccttcaaaaatcgattgcctccatatcatgcaaataatgaatgtcaataattgatttcacatactcttgagtatctggtttaaacattctcaccaaccggccatcatcataattaaaatacagcgttacaggcagtttcgaagaagcagaaataattcttgctatagttcctttgtttggtagacaatggcgatttattccatcagcgctaataatatactttccacattgtatcatcttaaatagagctaagctattatttgctacacttccatgatgcgaaagcaaaacagcatcgcaatgcagtttgttcgcttcactatatcctagtttaaacaatgagtgcattataactgatggtactgagtctgaaagccataaaactcttttccccacatactcaaacaatgcggctatactactggcgttctcaacactcgtatcttcttgaaaacattctatattaaaatcattaagtaatgttgcataatcatcaacaacattacccgcttcaacactaacctcatttgtttcagacttacacagtggacgattgtttgaatatttttccctaagcaggttcagtttgccctcatcaggagaaaggactgttaccgtcattccgtcaatactgaaagacatcccttctataacatccccccaatctaatgggctatgtgactggatgtattcatagaccttatcccctgagactatgccacatagcactccattcttattatcagagacttgttcaacatcataccttcttggcggattatatatccactgactaacaacattccccaaagcacaatctttttgaatatcttttatgaatctactagctccgccaatgtggtcatcatgaatatgggacaagaacaaagcatctatctgctctgaactcctaataagatttgaaataacacctttcaacacttgggtataagtcttagagtaccccatgtcaagaaatatgttacgacacctaccgctttcaccctcatactgtagatgaaacgcatctccacactttgccttgtaacagaatagtctcatatcacactctcttatatgttctgagaacaccttccggaacattgttattatccaaataatatactccacatggggcatatatgcactgacatccctttcctccacttatatatacccgcttttccccccgcacaatccacaaaatggccagctcactttgcttcaggaaccgtaaaagaggctcttttttaaccaaaatctggttgtacccgtatgttaacgccacaaggttgccatctttatccagatattgaccgtcatgtgaatcatactccatgcccataccctcgaataataacctacacggaatgctatatttgttgatagtgccagactgatcatcttcaatatgcccgcaggcctgctcacaagaataataatagggtacatctagcccatctattgaatttgcccaaccttgtcggtccctataaacgtctttatatgctggtgaccagtatttttccctgttcaccagatattgccagtcgtcggtcggtaattccacaccatcccataaaaccctaccatctaaagactgtattgccttctctttgtcttgttgctttacgaggatggcatctgtagccaaatatacatcatgctttaagagtttatactcatatttttccttaccaatgtctttgggttcatcccaactcctggagttattcagggtcaaccattctatgccgtcatcgtccaacttttggattaaagaaactggatctggcaaatctttaatcatggatgcccatgattcatttgtaccagagtacttccagttatcaaactgttcttcattataccattcgtgttcttctgccaccctgctatcatccgcctcctcactttcaacgctttttactcttgcaatcattgaaggattgatattcctcagaaaagattgccacgttccatgaaacaactcgtatcccccagagccctcgtttgcataatcatcctcatatttgtaattgtctgccaaaattcccataatctcatagaaggctatccactgatatttctttcctatgcggtctattcttttatccgaattacggaacgtccatttctttgcaaaacgatcgtaagcaccatgcaaattcacatcaaatcctaattcataggctctcttaacaacccaatttctaatcccttcagttgggaatctgccataatgatgttgcatcaaaggtaattcccttactttaaaaggaatcatgatatcgtataaagcctttttctgctcttccgacattaacttttcagcctcattacaaacaaattcgaatatagtatcgtttatgctagcattccttggccctttttgcctatttaagattaaaacagctttcctttcacatatatttatggccagtttcttcatatttcccttaaacagacgtaatgctttatcaaattctttttcttcagaaattggtactggataaaagtggtcgattgttggcttagtcagtttattccagaaatccgccaaccctcctttcaccgattcccaaatctggttttgctccgaaccttttctttccttgaagtttggtgcatcataatcaatatgaaggtagttaacttcatcatcggcaggccatgtagggagtgtgctcgtatatggcgggcgaacctttttcatatcaacagcagttataacccccttatatttagcgtattcaacaatatttcttgcataatctcgcagtaaaatattttttggtgggttattgcgtttgaagatggtctcatatacatatcttgcaagtttcatcagcccatcgcgtgatgaagtccgcaatgcgaccccgtaagccacagcatacaaccgttcatagatatacatatcatccacattctcaaattggcgtagtgtttcaatcaatacttctacctgctcagaaagaaggttgacaagagcctttgttgcctcatctctgtgtttgatatatgttgatgacagcagccaacaaagtataatggctgctaatctggtcgattcggaatctgcttttacagatacatcttcagaccatgcccagtctatcaatctccgcagaggattggcacatctgtcattatcatattctgcgcaatcattgaaaaagaattggaatatgctatcacgttttggcatggtaagtcccatcattaatgcatgaaaataatcagcattaaaagagtgattagggattgttgaaagctctaccagtttattataccaatcatcaggattaatatgacaatatttggagcctagaaattgaattatagtttccttgtcaatggattctatcgcgcgccaacacaaactatttatctgggcctcagaaattgtgttaagacatgtataatatactctttcatactcatcttctggaatgaaacgaatgacatctgtcatctcatgagcaaatctctcggggattaagatagccatggcttcaagaattcctttgaacgaccaatgcttgtctacaaaaatggaatgtaaagttttgtctgtatttatgttttctgcaaacgattcccagtcttgaaacttattgacaatttcacgtgcaattataaaatcactgattctctgataagagaaaacaacactgtcgatattttcttcatcaaaagaatacttcgttttaagcagcaaattgttgtctattagatctgcaagcaaattgtgacaagaaggaaattgttgttgcaataatgaatctgcatcttttatcttcagaagattatatttagcctcaaatataggaaatgccagcagcttaaccgctgcactgacaacatccctatatttatattcgggtttcttttcagcaaacttcttatccaaattcttgaagtactgattaaatagtgatgaaacgccattgaatcctttaggaaaatctttctctccagaggcttcaagtgtatcgcaaattatcttcaagaataaagggttacaaaactcaggtgtcaggatgggaacattgggtaagttcaactcatacgccaaacagaactgtcttaccgcctcatattccagacctttaaatcctttatgctcaataactgtagctcccgaatcagtttccaccccatcgggaataacatcatcaaagtatgtatcacgcactgacaccactaaacctatcgcaggatagtctttaagagacttgataagtccagaaagtctgtctttccataatacggcctgaggtccttcattcagcgcatcaatcatcagaagtgccctcgaacctacttgggttcctatctgattgaaactggataggaattcccggaaagtacccacaaagcctacttttgaagtaatggttgtttcataagtctcctcagcaaagtctgttcctaagaacaacaaagtgggcagaccatcatcgattctcttactggcaacatcacctaacaaatgcgactttccacaaccagcttcacccttaattatcaaatagggattgtttgctagattaatctttaaatcttcaaagttttcagtgaatgaatacaaatcttgagatatttctaataatctggcttcatcagcctcgagctctttccttacattatcatctttttttgtcgaggaataatcagaataaaatctatgtctaacttcctctaattcattttggagagattcaacacgcttcatcaaactagataaatcaatgatagcatctacacgctgatccaaatttgacaatgctacagtaaaatcgtctcgaatcgcttttagatgagattccaactgacctattctattggaatcttttcttgttctatagtttttctctgttaaccaggaatctatattcctgtacaaccgttcaaaatatgcaggcgtttttgccacgcagttaaaatacttggcagttcctgtcctcacattgactttctgacaatatctgggacccaagtttgctacggaatcttcaacattgttttttaatgtcttatgtcctaaaccgtgatgcccgaggaatgacaatgacattttctttttatactcttcttccagcagtttattgaaggaaatcaacctctgagcacttattacctttccacgctcttcgtcagtgtacctaatgaagatcccattaatatacaactcctcacaagcttctataaaaataccggaacctgacattccgacaattgtatcttcactataatcgtcatttgtagaaagctggaatacattctctgttatatcttcatgaaggtaagtcattctgatcattgccaaggacgactctccattttcgttagtctgattaagagttgccacagggaaccctttactcacggcttcgtcagttccaaaattcttatcaactacgtacaccgatggaaggtcagagacaaccgatgcaagctctcgtttattaataataattataccagcatcatctacgggatggagcaaaatgctttgcttaacaggggtaacgtattcgtatgtactggtatcggggttataaattcttaacgataccctacctttttcccctaacttcgaaaggcaatgtttagccgtcaaaacatataccaccccagacaatttcctattggtataaagaacgccagtccccaacttttcttttgagatatcatctttatgtaattcaaccgttaactgtgttattatattaagacatgtatccgtcataagcatttatgtcaatttccccacattatctattgaaaatcctgtatgtgctccaccatgaatagcaaacacctgctcatccattacaatcgggatgagacggagcaacaactcaaccttctaagtgtaaacacctgattttatatcattcatattctgcaagttctttcgagattatcatattttacttgtcgatgtattttcccgtaggcgtgattataagttcataatgatttcaagcatcttctcttgatgttgaaccatatcatcaacattccattctaatccaaatgaacgttttaaggtatcatctttaataccagcatcgtaattatcttggcatatttgtaacatgattctaaactttaaagaagcaacgcttacttggtttgactttgtatcaagatagcgattctttttatcaatgggattccagttggagccagaactgtttgcatccgaacctatcattgcaaaattaccaaagcaatttatatcttgcaaattaattagcatattatcaccagccttggcttgtggataataatgctctaaactttttcgtgttcgagagaaatagaaatttttgaaaagttccaactcaaagtcactacaacctaatgctctgaaaaactctattccattacgagaacttttctttgttacttcgaagtccttccgcatattataacctgtatagttaaaaacatacaaaaggaaaagtttcgtaacaagcaaaacggcattagcgatgttgaaatcatggtgattcttatcctgttccactccggtggctttcgctacttcaagtattattataaagagttattgtttttgtcccaaagcagtttagtcccgatacagtatgccaatctgagacaaaggatacacactgcataactttataacgcacattttcatacattaatgttgagattaaaatattctgatttttctaaatttatccctaagagtctttatcatacgtaaaaaaatattttcttgattctttttaacggatatttcttctctattggggagctctttattgattgaccattcaaattcattaatgccaaccaatgcagaaccctcaaaaatctcatcaacaatatgcaaaagttgcttaccaattgcatcaatacacattcgcgtaatcatctgtcggttattatcctgcatatcataaataaagtattcaagcatcggaatccagtcatagagggtacgacatttatctaatgtaaatatatctaagcacatttttctttttttcgctgtatacgaatagcgtttatgattaccgatatttgtatgatatgggtgtccataatgaaacaaaagtaattcaagccaaagatgtgccattggtacatcacaaaaacgacattgcccatagaaccagttattaatctctgatatcacctgattgacctcaggtgtcacaacttgtttaaaatctacatctatatattcatcatcaatatcattatcactactggcaccatgctttatatgttcctctattttattccaaacaggtaatgaatggctatatggagactgcaagaaaacctctgctatttttatacattctagtcgagatcttttggttccattactaagtttttcaataaattcatcttctaaatattgattagagggtaaacgttggccatccataaaagactcttgaataagcacatcatgaaaattccgaaaaaaatcctccttttttgctattactttactattgattagtctttttgaaagcatatcttgcttaaaaacttcatacgcaggtttatgtctattggcataatcaattattaaagctgtttgaaatgcagaatatgcattttcaaaattcatatcaataattgaccttaaattttcaatatcgatacccagcgcatcacaaccttccgctctttgaaccttactattttcctcctcagtatcattgcttgtcagaacagacgattcgaaaaaagtatcattatagaaaaaattggtaagtatttcaatattctcttcagttttatctggatatgttgtattgataacaagaatactcatatcattgagagcattcaagtccaacatctttaatacgaccttatactctttaaataaactcccagtaaaatcaagataaacaatatcaaatttcgtattctgtaattctgcaaagacttcaatcttacccttgtaaatttttagtaaaggatatgtattatggagtgattttacagccagattaaacaaatttgaatcacattcaaaagcatagatattctctattcttacacctaacccaagcaaatgttttacatcattctctggttcattaccgcagaagaaagcaatcttgagttcttctggcttcttggtctggtaacaaatatctgcatattgcttccactgaataaaagcttcaatatctagtttttcatttaattgctgctgacaatacagccacaaatgctccatataggttgtattcaagatgcgattactatccctgagagaagtcagcgattctacagcatgattccataataagacacgagatttatctttctctggttgtttatatgttgtcatataaaattacaaaatgtttaagtgattgaaaataaattgcagttaccaactcatagtagtaatagattacgaattaattatcagctactttatttttctgtgtgttgcgtaaccttcaaactcttcgtatgcaaaagtacgaattttaatggcacatattgaaataaaaaatagcttttgaagctctaaaacaagtttttccctaaaatctacttgaaccgtaagaacatcatcatcaataaatcgacgaccatgtcgcccccatactcgaatggtttataatgaagtttcaggaacttaaagaaaatctgggtgtaagccaccccaaaaaagaggaaaacagactaaaaaagggggggtaaactatagtttttttatatcaaaaacaaaaaacagattatcattattgtcaaattcttccgtaaaaacaacaatatttattctatttgtattacatttgctactgtagagtaagcagtaatgttactgtttaaaaaattctttaaatatgaatataaaaaaaagactcacatagcatcttccccattgcaaggctatgttgaagtctctaatcaaagcaatggtttggtacatagaacataaagaagctattgacaccctagtaaaatagttacgtgacatctttataactttttattaccagtaaaaaacaaaagaggtgaagcattgctcacctctttttctatacaaatatttcacaaattcattcattccaaggatagccacaagtatcacaaactccatcatccacataataccaatctccacaccttggacattttacacgatctaaatagttataatcatactccctttctgtctttatattctcgtataactgcatattacaattaataaattctttatatgttaactctttcataatatcctgcaaatatttaggcaacatccgttcaattttttctttattacccggaggtgtagctataagacccattgattcatattctcgataaatacttcttcctctccttactgttgtaatttcctgacaatcactaaaagcgtacatccctatacgtttaacagaatctggaatatatacagctttcagattcctacagtatctaaatgctaatcggtctatgtattgtactgatttaggaattataatttccttgaaagatttacattgatagaaagccgccctacctattcttgtcacagaactaggaattaaaatatttttcaagctagaacagccagaaaacatactcttattaatggacttcattgatataggaagttcaatagtttgtaacgaactacatttagaaaaaacagagctaccacaataaattaaatattgaggaagcttcatattctgtaatgatgaacaaccataaaagactccattacctaaatattttatagattcaggcaaatttattttctgcaaagtaatacaactttcaaacgcattatcctcaattctttctacaaaatcgggcaacactacttcaactacctcacttctaaaaaaagcattcctctttataacattcacagaagcaggtacgttaattatcttataattagaataacaaccaataagcgaggacccatctttagtcagaagcagattattttcaagaataaaattttcagatagattctcaattattgcttttgtatatgcaaaaggattctctcccatccatttgactgttggcgaaattgtaattaattctaaatcagagcaataccaaaaagcataaccacttattgcaactacacttttaggaataatataagaagtcacattagactgaaaagaaataagaacacgcttattcttagtaaacaaattctcattttcaacagtaaaattaggagaattattcacaaatttaactttattgtatactatgggatttcctgttatttttaacaaagatttcggaagtacaatttctttcaaactcgtatatgaaaaagccattagtcctatttcttctaaagattcaggtagtttaagttccagcaatgctttacaatctttaaaagcaaactccttaataatcttaactgaattacccaaagaaacttctcttaagaaaaaacagccgctaaaagctctttcccctattacctctacagaatcaggtataataacattaataatagtagaacaacctgcaaaagcataatcacagataatcttaacactttcttttattctatattctctacaagaaaaagttttattatcaacatcaattaatcgtaaaccatcacgactataaaaaaccccatatttgtccttctctgctgaaacaaaatcgtaatcagtaacttttgtcaattgaacatgctgtttgttattcatatctttaactttcatttttaataactattcagcgaatccgcaaaataaacaatattgataatcaacgttttgcagattttgatatcagctaaatccgtagaaaaactgcatttttgagcagtgtataagactgaacctctcataaatatctgaaagtcaggaacgtttttcgctgaatagttaccatttttgtcatactcattaacagttgctaaaaagttggaataattttacttttttatttcatagaacaacacatagccgaatcaacctcgtaaccaatcacaaaataaaaaacaatctgtttaaatgcatagttaaataaaacaaaaaacacccaattctacattgtagggtgtaaaactgggtgtaactctcgtaaatcactgacaatcaatgtttattgcggagagagagggttatgaacccactctccaatatccttgaaattcaatttcttatcagtatgtcaatgccttagggggtacaacttaggttacaagaataacgcttttctgtcaccttttggctgttcgttgtctacctaaaactacggttcaaagatacggctttcttttgatatgtgcaaatcattgaaaataaatattctgcggttagtgcaaggtgcaagctatatatagatatatacttgcaccttgcactacatctttagttttttagaaagatgaagtgttatcaagaatttaattgataatccgatagtataagttcagggaaaaacgctatctttgcagaactaacagaaaaagaaatagttgttcaacaatatgaaatggcagttgtgcatatagctacgctcaacgaatagcacttccaattattgctattcagcaatagacaggcttatgttttaagtttgcctgttattgttttgtcattatcccttattataaatccataagattgtcgtgctgcttaaagcggcaggatatattgtatcatattggtttgaacaaatgaattatacctataagaaaatctggctcatcgcttttcctgtaatgatgagcatccttatcgaacaactgataaatattaccgatgctttgtttttagggcatgtgggtgatgtggagctgggcgcatctgcccttgccggaatatggttcttggcaatttatatgctcggcttcgggtttagtttggggttgcaagtggtaattgcccgccgtaacggagaacagcagtatgcagaaacgggaaaaacgttctttcagggattgtttttcttgctgatactggcggtactcctctgtctgctatccaagatattttctcccgttctgttgaaacatctgataacttcggatgatgtttataatgcagttatccgctatttggattggcgtatttggggattgttgttctctttcccgttccttgccttacgctcgtttttggtaggcattacacagacaaaagctctgaacatggcagctttcactgccgtactggtgaacattccgctgaactggctcctgatattcggctttgacatgggtatatcgggagcggctatcgcatcttcatttgccgaaatgtgttcgctggctgtattggctgcatatatgtttcggcacattgataaaaaagtgtatggcttatactggcgtattgatataacggtattgaaagaggtattttctgtctcggtatggagtatgctccagttctttacaagtgtagccatttggtttctgttcttcgtggctatcgaacgcttgggagaaacggaattggctgtatcgaacattgtaagaagtgtttccgccctgttttccgttatcgtcaatgcattggcaggtgtcaccggttctttggtgagtaacctgattggagcaggtgaaaagaaacaagtttttccgctttgccataagattatccgtttaggatatgcgacaggcattccactgattgcttttgcgttgttctttcaccagcacattataggggcttatacggaaaatcccgctatcatacagcttgcatggccgccttttcttgtcatgctattgaattacttctttgcactacccggttatgtctatctgaatgctgccaccggaacgggagcgacacgaacagtattcatttttcaggtgataactactattgcttatctgttctgcttatggggattagatttttgtgatgtcccgttagcggtatattgggcagtggaatacttatatgtaatgctgcttggtacacaatccgtcatttatcttaaatataaacaatactaagaactgaaagttatgatgaacaagatatatccccgtaaaggtgacacgcaaaccgtttatttgaatgctgtcgtaaaagacccgtctatcgaaataggcgactataccatttacaatgattttgtttcagacccgtgtctgtttgagcaaaacaacgtattgtatcattatcccattaaccatgaacggctgataattggaaagttctgttctattgcttgcggtgcaaaatttctgttcaactgcgccaaccataccctgaaatcactatcgacttacacgttcccgctgttttatgaagattgggaattggataaggcagatgtggcttccgcttgggacaacaaaggcgacatcgtaataggcaatgatgtatggataggctatgaagccgttattatggctggtgtccatatcggtgacggggctattgttggtacaagggcggttgtgacgaaagatgtgccgccctataccattgtgggtggtgtccctgccaaagagatacgaaagcggttcagtcctgatataatagaacagatgcagactttgaaatggtgggactggtcggtagataagatacaggagtttttgccttatctgatgaatggcgatttagaaaaaatagtggcaatgaaaaataggtagctatgagaacaatagcggaagaaatgttgtcccggataaatgctgaaataaaattgcttaattatgacaatgatattacagcagatgatgctttgcacatggtaaagttcattactccgctatacagccaattaagaaagcttgtatcagactatgtatttccaacaaatgaagacgaaattctctttttcaaggaaatcaagcctaatatcctcgacaaatatctgtatttcagtaaggtttacaatatcgaaatgaaatgtcccattggtaacaatgagattatcaaagaatatttgaatcaagaattagaggaattaacccgtttcttccgtgacaatttggatttttaccaatactatcggtcaaaatccacttatatggatagcctatatttcgttcgcaagaaaacggacattcagttattgcttgacagtttccaatatgaccgtgacccgttgttttcaacggaatacgattataagattgcgaagatattatgtaacgaaatgttgcgcatatatttaaatcaacggttggtaaaacttggaaatacgaatcagttagaacacaagctgcaacaactggataagtatattttccgctttacaggcaaaaaggcatatcttattgaattaggatattctcttgtatcttcgggtgacataaacaatggcaacgtggaaataaaagaaatgatgaatttccttagtacgatattccacattgagttaggggattattacgcttcatatatagccatgaaagagagaaaggaccggacggcgtatcttcatcatctgatagataatcttgttaagcggatgaatgaggatgatatgaaataatctccagtattccagtatgtaagaagtaccatgttctccccaacatggtactttctttttatggtgaaatctactttgaaaaatgacattttggggaacttttacgccactattcccctaaaaatagcttgaaaaaaagtaataccatgatagatataaccatgacttttaggttatttcttctcccgaactttgcgacaaatcaataagttagcaatatggagattataacatttgagtcaaaagcctataaggaacttgacaacaagattaccgccatagcagactacattttcaatcacttggacgaaaacaagactgatgaagatgaaatttgggtggatagttatgaagtctgcacgttcctgaaaatcagtgaccgtactttacaacgcctacgggcggcaggaatgatttcttactccgacatcaaggggcattacttttataagattaaagaagtaaagcgaatgttggaagaacgcttgattaagcgtgataaggagtgtataaatgaactgataaccaatcatcagaaatatgttaaggaaagaagaaattctaagcagaacaaataacggtctgcttgttttcaaacattacttacccggtgactggcgtattggcaggcactttcttaatcctttttatcaggataagaaagcatcctgtaatatctacttcgaccgccatagcggtatgtacaagatgaaagacttcggtaatgacagttacagcggcgactgtttcttcctcgtggggcagttaaaagggctggattgtaaccgggcggctgacttcgtggagatactggaaatcatcgaccgggatttgggcttggggctggcttccggcactccggtttccattcccccggcaaccgttcgccgggcagtgccggacaaaaccgaagaaatgcccgaaaagccagtcaagccctaccagttccgggaacagaagttcacccccgccgagttggaatactggcggcaatatggcatcacgcccgaactgttggaatattacaaggtttgttcgctccgggaatacaacagcgaaacggcagagggtagaccgtactcttacatttcatcggtgacagaacccatgtacggctacaagggcaaacaatacatcaagctgtaccgcccgttctccacgccccgtttcctctacggcggcagtttcggcgagaactactgtttcggactggagtaactgcccgccaaaggcgatacgttattcatcacgggcggcgagaaagacgtgctttcgctggcggcgcacggttttcacgctatctgcttcaacagcgaaacagtgacgataccgcccacgttggtttatcggctgacattccgattcaagcacatagtcctgctttttgacatggacaagacgggcagggaaagttcatgcaagcaggaaaaactgttggaagaatttagcgtgaaacggctgctgctaccgcttccgggaacgaaagaagaaaaggacatatccgactatttcaaggcaggaaatacccgtgaagatttcctgaaactgtttatcgaatttttagacaacctgtatagcgacacattgattatgctaaaatcatgcgagatagatttcaacaacccgcccgccaaagcgcaagagattatttcggcgggtgacgttccattagggacgcaaggcaacctgttcggcatcaccgggggcgagggaacgggcaagagcaattatgtagccgcaatcgtggcgggctgcatctgcccggctggtgcggaagtagatacgctgggcatacagataaccgccaacggcaggcacaaggcggtcttgctctacgacaccgaacagtcggaagtgcaactgttcaagaatgtaagcaacctgctggcacgtgccaaacagccggacaaacccgatgaactgaaagcgttctgtcttacaggtatgtcacgcaaagaacgcctgaacgccattgtgcagagcatggataagttctactaccagtacggcggcatccagttggtagtcattgacggcatcgccgaccttgttaaaagtgccaacgatgaagcggaaagcgtggcggtaatagatgaactttatcggctggctggcatctataacacgtgtattctgtgcgtgctgcacttcgtccccaacggtttgaagctgcggggacatttgggtagcgagttgcagcgcaaggcggctactatcctttcgatagagaaagacgatgaacccgcccagtcagtggtaaaagcactgaaagtaagggacggaagcccgctggacgtgccgctgatgctctttgcatgggacaaggaagccgggatgcacgtgtacaagggtgagaagccccgtgaggaaaaagagaagcgcaaggaaagggaactggtgaatgttgcccgtgacattttcgggcgacagacacatatcacttatatagacctttgtgaacaattacagcaggtcttggatgttaaagaacgcactgcaaagagttatatccgctttatgcgtgaacgggagattatcattaaagacccggtgaaccaaagctattttatgataggtcttatttaatccggtagctttatgtatatagataaggaaaacttcgtggcttggatggagcgtattatggataggctcgatatgcaggacaaaaagatagaccgtctgttaagcgggcacaattacctgaacggtgaaaaactccttgacaatcaggatttgtgctttatgctgaaagtgagtaccaaaaccttgcaacgttaccggaagaaaggaatactgccttacttgacgttagacgggaaatatttctaccgtgcaagtgacatacacaagttaatccgtgagcgcatggattgagtgataatcaatatcatatattttcttcttgaatcctgtcttgttatgataataaggcaggatttcatttatttataaggttattccggtgattttcgctacttttgcaaaagtaaaataagagaataacggcggttgaacagtttcggctgtaatttcgtcattatatataacatattcgttcgccgaatatctcactacgaaaactggctcttttcaaaagaaacgggattttcagcgcaatgtctatgctatgctttgtcatagcgtggacttgcctgtttcgtttctttgggtatgccagtacctcgtagtggagcagtgtaagttcacgcttcttttttgaggtgtcaacgaataggttgaaaaagattatcaactgtttaatacctgataggatgaaacaaattaaagcgcatatcgccgtatctcttgacggacatacagccaccttagataaagaactggagtggttacccgataaagtaaaaactatcgttggcaaaaactatttggatgcagattgcctgcttatgggggcgaacacctacagctacatctttgaacactggggcgggtggccgcacaaaagcaaacggtcttttgtggtgtcacactacgacaccaacgtgacgccggactgcggcgtggagttcctgaccgaagaaccgctgcaaaggatttatgaactgaaacaggaaaccgacatactggtggtgggcggcggcaagctgcttacttcattgattaaagccggactgctggacagcctgactatctacaccgtgcccgtcatggtgggcaaaggcatcggctttatcggggaaacatccggctcacattggaaattctcggaaagcagggtgctggataacggggtggtctgttcgacctacctgtttggcgggaacgtataaaaaatgcgcccggttcccgccgggcgcaaccactaaaatttcaattattataagttgcaaaacctatcacaatgaaatttcagcggcaaagataggctattttttcggtttcgctttcttttcggggaatgaaaaaccgacattgaactgttcgtccagcaccagcgaagcatcgaaagccttgccgttcttgcccttgaagcccttgattagcccggtcttgcgtttcgtcaccagctcgataatctgcttgtcggaaagctgcttgtcgcacttgttgcggaatatggtaagcgtgcagtccacgttggaacacttcgccactttcgggtagaacaggatgcgcccgttattgcatttggggcaggaacaagtttcgccattggcgacagacaactgcaccgatagcagttccgccgtgatttgcgttgcgtacacctcgataccctttcggaacgtgtcggcatccatactgcccgcttctatcttggcaagggcggtttcccacatacccgtcatttcgacatcggcaatcttcttgtccttgactatcttgtaaacggcaagccccttgtcggtaggcacaaggttcttcttctcacgcacgatgtactggcgggcgaacagcgtttcgataatcgccgcacgggtggcgggtgtgcctatcccggcatctttcaggctggctttcagttcggcatcttccagttccctgcctgcgttctccattgccgccaacaggctgctttccgtgtgcagcggtttcggcttggtctgcttttcgagcagatccacgccggagagtggcaaacattctccctcttggagtggcggcaggctggcggcttcttcatccccgcccgtttcctgctcgccgaacacggcacgccacccggcttctttcatcacagaccctttcaccgtgaagtcggtatctccccctgacagcaaggcggtggtaacgtctttcacgcacttgcccgaaaaggcttccagcatacgcccggctaccagctcgtaaaccgcccgctcgtctttggaaagttcgccgggcaggttctcggtaatgattaaggcgtggtggtcggtcactttgccgtcattcacgctgcggcggttcaggggtgtgccgtccagcccggcggcatacccggcaaagcgggagtattgccccagcagggcgacacgttccggcatttcatcgaaaacgtcctccggaatatagcggcttccggttcttgggtaggacatcactttcttttcatacaggctttgcgctatggaaagcgtcttgtcagccgagaagttcagcttcgtgttcgcttccttttgcagcgtggtaaggtcgtacaaaagcggcggttcttggcaggcttctttcctctcaacggatttaaccacaagttgcccggcatcctttacccgttgcagggcggctatggcttcgggctgctgttcccacttggcggtcgattgggcggtaaaatttattcccccgctggcagtcgccgctttgagttgccaaaacttggcgggtacgaaattcttgttctccaaatagcggctgcatatcatcacgagcgtgggtgtctgcaccctgcccagcgagaacaccccctgcccggcggcaacgctcaacgcttgggtggcgtttatccctatcagccagtccgcttcgctgcgggacttggcagagaaatagaggttatcgtaacgctctcccggctgcaagttatccagcccctcacggattgccttgtcggtaaggctgcttatccacaggcgcacaaatggtttccggcagttcaggtaatggaagatatagcggaagattaactcaccctcacgcccggcatcggtggcgacaataatccggtcgcactggtcgaacacttcctttatcactttcaactgtttcagcacgccggggtctgccttgtaacctttctccgctttcacctgacgggggattaattgaaaatcgggcggcagtatgggcaggctctccctgcggaagttcgccacgccgtaggcttccggcatggcaagctggattaagtggccgaacgcccatgtcaccatatacccgttaccggaaagataaccgtcattacgcccggtcgccccgatgatgcgggcgatgtcctttgccacgctgggcttctctgctatcaatgcaatcataattctttactttttaatggtggatattacattttcattcctctggacttcttgggcttgtcagctttcaggctcttgtcctgcgctttctcctgcttctctttctgcttggcggtgggcttgtcctgaccctgtttcaacggctctttgccctgcttggtggcttcgttggtcttgccccccgaattgaccgctacctgcgtccggctctcggcggtgggggtaacgtctttcggctgcaccttgtcgggggatttgccctgtgcgccgggctgtacatgaccgttgaactcaacgcccttgccgtcctttagcccggcgacctgccgctctgcgggctgctgccactgctgcaagaactggacggcggcacggggcaggaactccaagccacgctccaccgcactgacctgcaaataggcactgcgctgcgtgccgtccctgaattgcaggttttccattttcaccgcttgcccggcttcaaaggcggctttctgttccgggctgacttgcacgttacagattgtatcggggcatttccacttgtcagcccgcatatactccagttcgtgcgtgtacctgtcccggctgacgaacacggggatttgctcgccgcttttcgggtctttgatttcagcgatgccgcccaagttgccagtgccttgcaagttgccctgttcctgcttggtgaactcgtgttcatggaacgggcgttgcaacagtttttcgtcctgctgcacgccgtgtagcttgggtactaccgtgccgtcctttgcctgatagaaagagatcttgacatcggtaggtttgagatagaagccgcccaccgtccccgaaacagtgtaagtgttgcgggacttgtagccacgcatcacccggtcgaagtccctcgtgtttttcagggtgtcggcggtgatgccgacttttttcaggttctcccagtcgatttttgacgggtcgaagcggtagccctgcttgaactcgtggaagtcgggcttcggaactcgaagcatttcagcccgcttgtcaccctccggtgtagggttgcggtggttgtcctcgattgcctttgcgtcccgctccgcttcggaagccttgacgctgaacagttccagcccggaagtgtcctgatacttgcggtagaagttggaaatgaagttgctgaacacatcgctgttcttgtccacctgcatgaactcgccgccgtgtccggtagtgggtggcacggtctgcaaattgccgtccttgtcgatacccttaacggcactcacctttccctgctgtttatccaagaccagcagcacgtctttttcctgcccctctgcgggcggggtcattctgtttgccataaataattggaattttagtggttacgggaatagtcccgcccaaaggtagcgactaaatatgctatatttggacgggcggcaaggactgtccgaatttgtccggtactgtcccaatttgtccgagtgaataaaaaaatatccaaccaatagttggagaaataaaaaacatcttcggcaaaatatttgttatgttttttcaggtgattacataatatactatctttgcttcatagaaacaaagtacataaatatggcttcattcaggaaagagatacttgggcagattgaacggatagataccgggcgtatattcacgttccgggatttgtcgtttgaaacggaaaagaccgccaatgttgcggtgctactttccgaacagagccgcaaaggggtactggtacgggttgaaaagggggcgtactatcgtcccaagaaatcagtgctgggactgggaaagctgcctgtctatcaggatgaacagttccgctatctgactgaaaaactgaacggctatatcacgggtgcttacgtctataacaaaatggggctgaccgaacaggtagccacaaccataacgatagccactcctaacccggttcgccgtttccgtttcaagaacttggatatagagtgcgtgaaagcctactgcatggactacccggatgaaagccttgtcccgtacttgcggctgctcgatgcgataaaggacatgaagcgcatacccggaacaaccgggcaggacatctacaaccgggtcaagagccaatatttcaacgggtatagcctgctggaactggaaaaaatcgtatctttggcgaaaagttacccgccacgtgtcagaaaggtggtggcggacatactgggcgacatcagacaaaccgtattgcaaacagaaatggcaaagaccattcttcccacgacacggttcaacttggattataaaacaagaaaaacgcaattaagataaaatattcaaccaatggttgcgaaattaagcataaaaaagagagtgaaatcaatcactctctttcgatgaaccctttgtgaacccttttaatggttttcaaatgcttgttaaacaggaagttcagcatttcataaaagcaaaaacattcaattatgaaccctttgtgaaccctttaagtgtataatgagtgccttttcctgttgttccttgtatttccagccagttatccagttgcgacaaaattcgataagcagtagttttactggtatttaacaaattctgcacatctgaattatttatactcccattttgggcggcatactcaataatgggtatatacctttcatccactcgctgcgccaatagctgcgaacgtatatcggtataataggtaatcatcagaccgcttaacatttcaagtttgggtggcaacaacttgtatgcgctgacagcttccaagatacgcttgtagccacgtccccagctttcaatatccccgcttctgaaaaaggcgttggcgattagcgggttatagggagaggacgggtggctttcaaaaagtttttcggtcgtccagctttccggtaactgtccggcgttccaaaaggtgatatggtcggggaacacgctaatctgaatgggtacggcactggcatagtctttatgtgccacacaattcatcagtgactccctgatagcttccaccgggaactgcggtgtttcacgccgggaaattccctcgtatgatatatgataaatcaggtatttggtctttatcaaatccattgccttatccacctgctccattaaagagccgtgaacctcgtcctgaaactccaagttacccttatcatcccggaagaaacctatcttgatataagccccggttacaaagcgttccgggtcggggtggaacaacagcaaggcggcacgggtcggacggttggtttgggtgtcaatcagccgcaaatcgtgcagcaaattttcggtagtatctttcaacacatcttcgtccacacgcccgcttctcgccgcttccttgcggaaacggttcaatgcgccgggggaaagttcctctatgcctgcccactctatgggaaactcgtcccaatgcctgccagtacgttgcaggataaaacggttcaacgccgcacctttcaactcctgtttcgtgctgccgctgcgatagtggtactgacctttgtaattgataggattggaataaggcggtacgtcaatctcgatatatttcagcccgttttcttccagcaggttcacgtccacgatgatacccagcacgtcacgcactttgttcggtatatcctccagcagtttgtcggcatcggcaacgccgactaccttaccgttgtcattcatacctatatatatcttgccgcctgtggcgttggcaaagccgcatatccatttcagatactcgtcacgccagctttctttccattccgtattttggttttcattcataatcatttctttgtctgcaaaattagtaaaaatactgtctgtcaggaaagaatatcggttattcttcctcttttataaggtggcatagctccgggtcgttcttaatccgggttatctcgtcctcgacaatctgccggacttcctgccggatgcggtcatagttggcttgtatctcctcctgcatccggtcgttgccgtccttgtcggtgaagtcgattatctgcggcaacttcacgtaacgggcggtttcccgcttcaccttttcattgtccaccacgatttcacagtggaaaatcttctgctctatccgttcatcgaagttgtccgccacagcacccacgaacataccttgcgtgaggttggatattttgctggcgggtatcaggctgtccatttgggtgcttatcgaggtggatttttcccgctggttgattgtcatgctctgccgtttctgcaacacctttccgaaacgctcggacagtatttttgccgtttcaccgactacctgaccgctgaacacgttgcccaccgtattttggattacacggctttccttgtccccatagtcacgggtaagctggctgtaatcctgaaagcccaacagaaccgcaaccttgttgcttcgggcggtggcaatcaaattatcaagcccacgaaaatatatagtcggtaattcatctattatcaccgaacttttaagctgacctttcttgtttatcagcttcacgatacgggaattatataatcccagtgccgccgagtagatattttggcggtcaggattgttaccgacaaccaagattttaggctctttcgggttgttgatgtccagtgaaaaatcatcgcccgtcattacccagtaaagggcgggtgaaatcatccttgaaagcgggattttcgcactggcaatctgcccctgcaactgttcaactgccgaactttcccaagcatccacgaacggggaaagatagttttccagttcgggataactgcgcaaaatcgtgaaaacatcggcgtatttcttgttcaacaactctatggcgtgcgggaacgtgcaatacctgccgccctgataaatgcgcaagtaccaaataatggctgcaagcaggataatcgggctttccacgaagaagtcgccctgcttgcttatccaacttcgattgaggttaagcattatcgtgtagcttgcttcgtaggcatccgcaatgtccgacatgaaactggcgtttatcgggttgcatcggtggctcttgcgtgggtcgtcaaaattgataatgtagaatttgggctttaccttatacccgtccaagtggttaagcaaatgattataagtgatttccgataaatcgggaaacttataatcatagcagtagagcgcaaaacctttctcgatttgctgttttatgtaactatttaccactgcatacgatttgccgctgcccggcgtacccaacacaaggctggcacggaacgggttcacaacatttatccagccgttattccatttcttcttatagtagaaccgggtaggcagatttaccgaatactcgttctcgataagccttgtttcctgcatgaaactctcgttctctgtattaaagacatcatccattaggttgttcttcaacaaccgggacatccatgtacccgccatgagcatacagatatagcccgccgatagcgtggcgatataaaacacagtgtccgccgtatgtggcagcggaagttccagcagccaccagttcaggaaaaacaacacgacacccgccacaaggctgcaatgtatcttcgcccacgttatcttttcctctttcacgcccttagtgccgatgcacgacagggcgaggaacaccaccgcaaaaagtttcgtccaaaggacggacgagaacagcccggtggtgcgctggaagttccacagtatcttgtctatcacttcaaacgtcactccccattctttcagggtggagtaacagaaccagtacacgtttattcccacgaatagaatactgacagcccgcataaagtccatgacccttgcaagccctctcaaatcatcctcttgctgcataattgtatgtttttaagttagtcaatgcgccttgtgcgcttctttttcttctttctcttttggcgggcggtgtcctgcggctcgtcaccgccagatgcaccgccgcccagcaaaccgccgaaagcacccagcacggaagccatgcccgaaacgatgtcggatttcggcgtgaagcccggctgttcctgatgcgtgggctggtcttgctgcggtgctgccacttcggactggtgtatctttccggtttcgcccgaaaaacgttcgttgaacacgttcgccgaatactccttgcccaagcgtgaaccgttcagcaccacccggctgtcgtggtcgatgaacgtaacgccatagatgcgcccgctgtcgttctgacggaataccacgtcaatgccccgcttccttagctgctgttccagttccttgcggctgcgggcggtctgcatggcagtggctacaatcttccgggtgcgctctttcagtttcccgttcctgattgcttcgcccgatttctccattctgcgctgcactgcttcataacctaccgacttgccgatgcgggaagcctttaccgggttgcctgtcttttcgcccttgtcattggtggcggaataaactatgccctgatagggcttgccgtttatctcgcccttgacttcctcggcgcacacgttgtaagcggcaagcaaagccttgtactccccgaacgactggaagcggtagccatagcaagccgctttcacggtgttgccgacttggtgcttcacgtccccggcggcatagtccacctttttcagttcggggcgttcggcacgttccttccgctctgccgggtgcagcccgtatttcttttccagttcacgggtgatttgcttgctgcgccgatgctcgaacctgtcattcagcggtctgccgttctcgtccacccgcaacccc

SEQ ID NO: 610 - DNA, 113597 bp, Bacteroides caccae
  source 1..113597: mol_type = genomic DNA
ttcttctaattcctttatataaaatattgcgaactaatacgcttaataattgccttgtaacaaagtttcctctaaataatatatttctattattgaagtatttggctatttttcctaaagaataaccctcaagagctaattggaatatcttcttaacattggctacttcttcttcgttttcgataagtattttctttggtctatttccattaggattgtaaatagcattgtacccataaggaattttagcatcaacaacagcataaggattttgacttaataacgcttgtttcccttcttgatttttacgttttatttccttacggtcttgtgcagccctaaaagctccaacaagtaatataattaattctgtaatatctagtgttgaatgagcttcatatactttacttggagcatctaggaaaattagtgataatccattgtatacaatattttggattatgtttatagtttctaatatttcttcttgtctactaagacgagatagttctgaaactactagtatatctgcatctttacctgtaagtgcttgtagtcttaaatagccaggtctatcagattttgcaccagatatgccaaagtcaataatctcttcattagcttgtaaattattgtttttacaatattccttaaactttattctttgtctttcaacatcttggtgtgttgtggaaactctaatataggctattgcttttttatggttcatggtaattgcattatatttggtgcaaatataatatgttttcttgtcatgggcaagttcgttatgttaaacgagtattcgtgtcaaatactggcgaatcgtatcgggtttatcggtaatggaggcccgtttacattgatgcagttaaaggtgattcaggaagtgataactcttgtcatctttacggtgtttactactgttttttttaaaggagaggcactgcactggaatcatttggctgcattcgtttgcctgatagcggcagtgtattttgtgtttatgaagtgaaaagatattgtttgtcaaatccgatatgaatgtttgaaaattagaggctctgttttacccaaacagagcgtctgttttatataaatagaggctctatttgcataaaatagagcctctaatttattcgtatattttcgttgtctttttattggggagtagttatgtattttttcatcccttccgtatagtaagtcttaaattctccgttgtctccactataaataaagtacgcgtcaatcttggggtttgctttgcagaatgtttcggcttcttccagtcccattaccataaaggcggtagccagcgcatcggcggtcatacagtcttctgcgattactgtggcagataagatattgtgttgcaccggataacctgttctggggtcaatcgtatgagcgtatttttttccgtctttatagtaaaagttacgatagttgccggaggtagccataccgaggtcggtgaggtcgagtaccgtttgtaagtcttgtctcacggatagggagtcgtcaatcggtttgttgatgccgatacgccataagttgtttttggggttaaccccttttactaccacttctccgcctatgtctaccatataattctttattcctttccggtcgagcagttgggcgatgacatccaccgaataccctttggcaaccgcactgcaacttaacatgatgcggggatcttgtttgataactcttccattttctagtttcaccttttcataatcggtgatttgcagcaggctatctatcattaatgagtccgggaaagctcctttcttgaatccgaatccccaggcgttggccagtggggctatggttatgtcgaaagcacctttggtttcacgggagatttccatggaacggttgaagcatttttgaaagaaactgtctgtcactaattcttcattacgatttacacgactgattacggaactgtcattgaacggagataatgaaaagtcgaaacgtttcagttctgcttcgatctctggtttcaagtcactgtcatattggtaggtgatgttgtatactgttccgaatacaagccctttgatattgtaatagtttgcttgctgattgtgtctggctaatatccaaatggttgccagaatcaggaacgctagccaaaggaaacttttctttgttttcatacgcttttctatattttgatgagaaactttctctttttattgaaagaataaatgttcaaccaatatttttagtccgatgatgactaaaatgatacctccccatagttctgcttttaactttcgggcaatcccgcagccgcattggataccaaagatcagcccgatgagcgacatgacaaacgaaacaagtccgatgatacaaataggagagaggatttgagtataatcttgaactcccagaaaggcgaaggaaatgccgattgccagtgcgtcaatacttgtcgctatcgccattgtgaatactactttcagcttggtgggattaaatagctggcaacattcttcttccttgaaagattcgaaaatcattctgccgcctagaaaggcaagaatagcaaaagcgatccaatggtctacgctttctatcaggtgactgaaactcttggcgaacatccagccgatgaaaggcatgagagcctgaaaaaatccgaaggcgaaagccatgaccagcatcggtctccattgggtacgttttaaaataataccgcttgcaatcgaaacagcgaaacagtccatcgccaaacctattgcaagcagccaaatctctagtcctgtcattatattctaaagaggtagtttataaatgagggaataagtgattcccatattgttcgatttatattttccgtagccgggcacataccaaggatctccgtattctcccgtagaagcgctggttttatatttcatgcgtaccgaccagcccatgttgaagttcttgtaaatgcgtactttaactcctaatacgatttccaaccattgtacggaggctttcattcccggatgattgaacgggatacttcctccccagtagtcgtctccgagactgggattaccgatgttgtccccccatatcggatcatctgccggcagggtcgatacatcgtatttgaatgaactgaacgcataacggatacctgcatacagataactgtttttctctttcttctttgccattgtgttgtaatccacaccgatgcggaagaaaggggctgctttacttttatagtgtatacctgtttcgctccatgtgtctgtgcctcccataccaaactcaactgtcgggatgaatttgttcttgaggttgactgctatacttacttcagaactcataaagtcaccacccagaagtttacttccgatgccgtataagtctacacctacatacgtcccgttatagaacggaattgtatctatctcggtaacttcctttttcttctgatctcttttgggtgtatggaccgggcgttgctgctgtgctatcaacggaagcccaatacaaaagagcagaagcagactaattagtctcttcgtcaggtgtccgctctcggtatataaagaatatttgtagattctcaatttcatttgtattggcttctttatttcgtaaatagatagaatctattgtttccgcactgtttgttttatttccaaacttggcgctgataatgttctgtttcatcatatatccgcattccatagactggaaatagggagtgttttgttgcacaatgtataaagtgtctgcgttatcccaattacgtacagggtcataccggagaataaatatagtagaatcgctggtatatcgtaatggtaacatcactttgtgaactttcttctcattatttagaataatagagtcagttcctaatgctgtaatagttaatgaatcgagtgtgtcatttgctataacgtttggaacgagagttttgtcaatggacttgaatgtgcaatacatcatcggtcgtcctgccaacgaacagtcgttttcgtccgagcacgaactgtggatactgatagcaccaccgacaattagtaatatgagaaagatacgaattaaattcttcataatcaatggttgaatgtgaatcaaattttcttttctatctgatagttattccgttccggtgcgttacgcgagatcagttcacctaagaatccggcgaggaacagttgtgtacctataatcatagccgtgagtgacaaataaaaatagggagaatcggtcaccagtctataggggagaccgttgtacatggcgtatagcttgcttacacctacaatgataacggatatcattccgatgagaaacatcagtgaacctagcagaccgaaaaaatgcatgggcttgattccgaacttggaaaggaaccaaagagaaagcaagtccaagtatccgttaacaaagcggttcagtccgaatttggttgttccgtatttgcgtgcctggtggtgtaccaccttttcaccgattttcttgaatccggcattctttgccagataagggatataacggtgcatctcaccatagacttcaatatgtttgatgacctctttgcgataggccttcagcccgcagttaaaatcgtgcagattcttgatgcccgagactttgcgtgcagtggcgttgaatagcttggtcggcaatgtctttgatattggatcatatcttttctgtttccagcccgaaaccaaatcgtagccgtcttccgtaatcatccggtatagttcggggatctcgtccggactatcttgcaaatcggcgtccatagtgataaccacatcaccctgtgcctctgcaaatccgcaatagagtgcaggtgatttaccatagttacggcggaacttgatacctttcacacactccgattgggctttgagtttttctatcacttcccatgagcggtctgtacttccgtcgttaacgaaaatcacttcgaatgagaatccgttggcttgcattacccgttctatccaagcgtagagttcgggtagtgactcttcttcattgaataatgggactacaactgatatatccatttttattaattactatttacgaattacaaattacgattgagacagtccgttgttttccggtttggcttttttcatgaccattagtccggtagggatagccagaagactgccccaaaacacatcccatgacagtaattgcatagtaatgttgattgaggtgagtgaacgggcggtatctatcgtttcttttataatatctttgttttctgccagggcaggagtgttggtcattaactcgtcccaaagttggatgtaagaattgacgatgaagccatggtctatgaattggaaataaatgtagtgcaccaccgctaccaacaaagaagcgaacatatacataaatatagtaaagagtactgcatgagaaaactggatacttcctccgcagattttatcccgatacatcttcacgtagtggtaaccgatgaagggcactgccagcgtcaggattacgaataataatgaaaggaagggtatatgaaatcctaacggaaataatatgaatttcaatatccaatagattcccatatacgtgccaaagtgcatggcatatttttgtaaataacttctgttttctgtcatcatcatttataaattgcgcacaaaggtacaaataatctcggttggtaggggaaatatggttgttaaagttaataaagctacaaaagttactgtctgaatattttttttatgattttaattgattgaaatgtagtcggttagttgttggctggtgaaaaaagtttcttgcacctattgcagaatcaataaaaatgtctacctttgcaaccgcaaaacgggtaagtcctatacggccagctcccttcgaatcctccagggcttgatcgcagcaaaggtagttggttgtagcggcgcgatatagtaagcttacccacccgcctctttagctcagttggccagagcacgtgatttgtaatctcggggtcgttggttcgaatccgacaagaggctcaaaagaaggatgtcaatccggataaaaaagcattcagatagttgtctgaatgctttttttgttatctgttcctgtataattttataaagattcccaaagttgccagaatgattagtaaggtaagcccgaatgcccaatagttgataactcgtgattctgcggtaagtacataatttccagtcagaagccggagaccgtctattttccataccattatattattggttgaaagactggcgttggaagaaagaagtgtgccgggcattgtcaactcaaattgtatagcatgatagaatacttcagcaatcttgattttctgttcgcacatattgtccattgcctttgcatgggctttataaagttccgagtaatagtttgtttgaccgactttatcaaaaagcgcacagacatcatctattcctgcgtctccacaactgtctttccctgacaggtgattggtatagactgtttctttgagttcgttcaggcgatttacgtagaccgtgtcacctttttgtgaggtaaattggcgaatgacttcccaaataacttcgtattggctgcgattgtaccattctccgaatttagcttcgagtttatctagtttgtcgttttgttcgatgccgttcataccgctaaaggcagcgttgtctccacgaaaccagattatttgttcttctttattcagatatttgtcaagagggaccggtcctttgtccggaagttctttataagtagcggtatatatataataggtataaaaccatttgaaacgtttctttaactgttccgtaggtattgccaaagagctcatctgttcttttccattggagatagagaaatattctccatttatcaggggaatattccggcaggcttttacattcagtttttcttcttctccccagaaattaaatttgagggtggagtccagatttactatctgccagtcggtatccaattgaaacagaaatgggttatgtgtcttatttcctgcaatgaaagcggaatcacctcgtgcatagacctctctatgcatacttccattggtgtctatccgtgaagtcattctataataagtactgcacgaagtcatacccagtgacagtaacagtagtaatgttgtgattgaatgattagttttcatactctgtttatcttaattggttttcttttataatttgaagtattcgcgtctgccggagcttccggtgctgcgtgtattgagaggataggtaggtacttttctccaagagttgcatttcttcccagttcttcggtaagggaaatgaagtgccgtttggctgatagacatatccattttgcgtttctgcttcggaaggggagggaggaaaacaagcatcgtttataaataaaaagagcaataacgttgctgcggttcctgatatccaagcaccaacgagatatcttatctttttctttttaggagcgttatcggttatcttattcagaatagccgctgttagttcttctggattttctaatatgggttgtctgtttttgatttccgtcaaccattcttcgtactttttatcttcttgtttcataagtcggggtctatttgattcattttattacgtatattctttcgggcaagatatagagtgctttttatcttctcaggtgataggcctgtgatagtttgcacttctatgacttccagttcttctacatcacgcagcatgaaaacaagtttctgctggggaggaagttcgttggtatagcgcaatatcaattctttcagttgcctgttggatagagatatttcaatattgtcgtccgatgcgaggttgatagaatcagaaaaggcgaactcgttgttcaaagacgaatggcgaagtgaacgtaaacggtcataacacgcgttgcaggtgattttataaagccaggtagaaaagcgattcttccgattatatgttttcaaggataaccagacttttacaaatgtctcctgtgttatgtccctggcttcgtcttcgtcacaaagcaaccggaaggcaagcctgaataccattggctgaaattcggtgaccaactgggcaaatgctgctgtgtctttccgttggctccggtctaccagttccagtgtcttttcctgatttatcattgtttattcattcttgtttattatatgatacgcatgaaaatgtttctggtcgtttgcgaatcatcaaatatataaaaaaagaggataggctttttaaaacctatcctcttttatttataaagtaaaaagtatgcttacttgattctcttatatccatatacggccaagtcacccaattcttcttcgatacgaagcaactgattgtatttagccatacggtctgagcggctcaaagaaccggtcttgatttgtccgctgttagtagctactgcgatgtcggcgatcgtagcgtcttctgtttcaccggaacggtgagaagtaacagttgtatatccgtggcggtgagccatttcgatagcgttcaatgtttccgttagcgaaccgatttggtttactttaatcaggatagagttggcgcagcctttttcaatacccattgctaggaagtcgacattcgttacaaacaagtcgtcacctactagttggcaacggttgccgatacgttcggtaagtttcttccagccgttccagtcgttctcactcataccgtcttcaatagagtcgataggatatttattgatcagttcttccaagtagtcgatctgttcttcagcagtacgctttttgccttttgcaccttcaaacttggtgtaatcatagatgccgtcatgataaaattcggaagaagcacagtccataccaatcataacgtctttgcccggttcgtatcctgcagcttttatagcggctagaattgaattcagagcatcttccgtaccttccaagttgggggcgaaaccaccttcgtcgcctacggcagtgctaagaccgcggtcttttaatactttcttcaatgcatggaatacttcggcacccattcttaatccttctctgaaagaaggagcgcctacgggacgaatcataaattcctggaatgcgataggagcatcgctatgtgaaccgccgttgatgatattcatcatcggtacaggcattacgtaagtatttgttccgccgatataacggtatagaggaaggtcgagataactagcggcagctttggctacggcaagagacacaccgaggatagcgttggcacctaaattagatttagtcttggtaccgtccaatgccaacattgcgtagtcgattcctctctggttgagtgaagacataccgattagtttcggagcgatgattttatttacattgtcaaccgctttttgtactccttttccaccgtaacgttgtttgtcaccgtcacgaagttccaatgcttcgtgttcacctgtggaagcacccgacggcacggatgcgcgtcccataatgcctgattccaatactacgtcaacttctactgtggggttacctcttgaatcgagaatttctcgagctacaattttttcaattttcatcgtttctattgtttttgaataagatttctgcaaaagtacggacttgacagagagtgagaaatcactataaataggtattctttttggccctattccctatatgtcgttagtccgatcttataatataacaacgggacgatgttttttgtttgaatgcaggcgaatgaaatttgaaggattttagtcttcgataataacacccagcaaaggaagtaaatccatagcttgtaaggacgtgataatagctccttttaggtcactggtattaagtgttatactgctgatgcgggaggtgcgtaggtctattccccggagtggggcgtgtgagaagtcggcttccaccaaatcgcaactatcaaaagcgacggaagaaaagcggcagtcattgaaactcccgtttctgaacaggcagtgcgcaaaacgtacctggttcattttactcattgccagattgatgtatccggcattgcactcgtgtagcagaatatgattcaaagtggtttccgaaaaattagttcccagcaacttacagaaaataaattctactcggtacaaagagctttctgcaaaagaaatattggataggtcgcagttctcgaaccggacatctgtcagttgggatgaatggaatttgcattcgctgaatatctgattttggaaagtacagttcttgaaacttttataggacttgttgattccttcttcttttcctttgttaaataaaagatcggagactgtttcttccttgtcaagccattcttgtaaagtgcttgcactggtttcttgttcttccattatcggagaaactacacggacgggtttagctgtatttctttttgtcatgttgcaaaggttccttttttataattgttttcctaaataaccgcctgccactacagctgtcagtcctattgctatacttaatagggtgtaggtaatgaatgtaccgtaaaattctccttttaacagccctatgccgtcactggagaaagtagagaaggtggtaaatcctccgcataatcctgttgttagaaaaaggcgaacttcgaaaggaaagtggaaccgttcggaaagagcgtaaaatagtccgatgagaaaactaccgaagatattgaccgtgaaagtagcccacggaaaattgtagggaacaatccgttcgtgcataagtagctgtatgcaataacgcaatgcgctaccggtgccgccaccaagaaaaatatagataatttctttactcatttggttttagatatttgtatcagagttggtgtaactctttggaaaaccttaattccgcaacactattacaaatataactttttaagtacctgagcaacaaaaagttgctcaggaatttgccatgtcagatttttcacctatcttagtgttgcaaatcaaaatatgtatcaaacccgacagacatggcaaaggtagcaattaaatccgagaaactcactccttttggaggaatattttcaataatggagcaatttgactccagactctcatctgtaatcgactcaaccctcggtatgagatgcaggctgtatggttatcaatacagcgaaatcatccgttcgcttatgagcgtttatttttgtggcggctcatgcatcgaggatgtcaccactcatctgatgtaccacctttcgcttcatccgacacttcgcacatgcagtgccgacacgattcttagagccataaaggaactgacccaggataacatttcctacacatccgacactggcaagacctacgacttcaacacggcagacaagctgaatacactgctcctcaattgcctattgtccacagggcagctgaaagagggcgaggggtatgacgttgacttcgaccaccagttcatagaggctgagaagtttgatgcgaagcctacatacaagaagttccttggttatcgccctggcgtggcggttattggcaacttgattgtcggcattgagaacagcgacggcaacacaaatgtccgtttccaccagaaggacacgctgaagaggttctttgaaaggtttgaacaaaacaagcttattatcaaccgtttcagagctgattgcggctcgtgttctgaagagatagtggaagagattgctaaacactgcaagaccttctatatccgtgctaaccgatgcagttcgctctacaatgacatctttgccctcagaggttggaagaaagtggaattgggcggcattgagtttgagctggcctccattctcatcgagaaatggaaagggaaggcataccgtcttgtgattcaaagacagaagcggatagacggcgaactcgacctgtgggaaggagaatacacctaccgctgcatccttacaaatgactacgagtcttccgagaaagagattgtcgaattctataacctccgtggagggaaggaacgcatcttcgatgatatgaataacggattcggctggaacaggcttccaaaatcctttatgggagaaaacacggtgtttcttctgcttatggcactcatacgcaacttctataaattcatcatggcgaggcttgacgtgaagaggttcggactcaaagcaacaagccgcatcaagacgtttgtctttaagttcatctctgtgccagccaaatgggtcaggacatcaaggaagtatgtgctgaatatctattcatgcaacaatgcttatgccaatgtgttccagaatgactttggataacaccgacaacttatagtcgtgattttgcgtattgcctcaagtcgcatggtggggtaaggggcatttatatgtctttatggtgacattcgatgcactgtgccccctttttactaacgatgcagattcttttcgcttctgtatcatattaggcgcgtagttgcggatttgagggaaaaataaaataattgtgtgcaaatataggaagaatgtgtaatatacgtgtatagtcaatctgttttattcggcatagctactgtgcttttttctctttactttcattattcgttttgtaattagtgttttatgtgattggatatatattatggagaacattattgcagtacatcggttgataagaaagtaacaaaatagtgatttaaaacattcaggtgaaaaagattgtttttttaatctccatattttaataaatattagttgttgctccgcaaagaaaactaaaactttgcggagttctttttttattagacggattcttttttgtacttttgcacatctttttttaaaacatcatcaataaagagaacgacatgggaggttttttcggaacagtctcacaagtgagctgcgtgactgatttattctacggtacagattataattcacatttggggacgaaacggggtggacttgctacctatagtgaagagcgaggtttcatccgatcaatccacaacctggaaagtacttatttccgtactaaatttgaagatgaactggataagttcaaaggaaatgccggaatcggtattattagtgatacagacgcacagcctattattattaattctcacctcggacgctttgccattgttactgtcgcaaaaatcaccaatattaaagaattggaagatgagcttctctcgcagaatatgcatttcgccgaacttagttcaagcaacaccaatcagacggaacttattgcattacttatcatacaaggcaaaacttttgtcgagggtatcgaaaatgtattcaagcatatcaaaggttcttgttccatgcttctgttgacggaagacggaagtattattgctgcccgtgaccagtggggacgtactcccgtagtgatcggaaagaaagagggtgcgtatgctgcaaccagtgaatcatccagttttccgaatctggattatgagattgaccgatatctgggtccgggcgaaattgtacgtctgtacagcgatcatgttgtacaactacgtaagccgggtgaaggtatgcagatttgttcgttcttgtgggtgtattatggtttcccgacttcctgttatgaagggaagaatgttgaggaagtacgtttcacgagtggcttgaaaatgggacaaatggataaatcggaagtagactgtgcttgtggcattcctgattcgggagtcggcatggcattaggatatgcagaaggcaagggagtcccttatcatcgggctatttcgaaatatacaccgacatggcctcgtagttttacaccgagcaatcaggagatgcgttctcttgtagcgaagatgaaactgattccgaatcgtgccatgctccaaggcaaacgtttgttgttttgtgacgattcaatcgttcgtggaactcagttacgtgataatgtgaagattctgtatgattatggagcaaaagaggtacatatgcgtattgcttgtcctccgttgatttatgcttgtccgtttgtcggattctcagcttccaagaatgcgttggagttgattacccgccgtattataaaggaattggaaggtgacgaagataagaatctggagaaatatgctaccaccggctctcctgaatatgagaagatggttagcattattgccgaacgcttcggtctgacttctttgaaatttaatactctcgaaacattgattgaagctatcggattgccgaaatgtaaagtgtgtacacactgctttgatggtagtagccacttttaaaagatattatacaataaaaaagagccgtgaattgctttgtaattcacggctctttttttacctttacggcactataaactatcaaattgtaattaataacttgtaattaaataacatgactttagtagacagattcttaaagtacgtaagcttcgatacacaatctgatgaatcgacagggattacccccagtactccgaagcaaatggtatttgctgaatatttgaaaacagagttggaatctttaggcctggaggatattactctggacgagcatggctatctttttgccacgcttcctgccaatatagataaggatgtacccacaatcggatttattgcccacatggatacaagtcctgatatgagtggtaaagatgtgactccgcgtattgtagaaaagtacgatggttcggatatcatgctttgtgccgaagataatataattctttctcccgttcaatttcccgaattgcttgatcataaaggagaggacctgattgttaccaacggaaaaacattgttgggtgcagatgataaagctgggatcgccgaaatagtatcggctgttgtttacttgaaagaacatcctgagatcaaacacgggaagattcgcatcggctttaatccggacgaagaaattggtgaaggcgctcataaatttgatgtggagaagttcggttgtgaatggggatatacaatggacggaggtgaagtaggagagctagagtttgaaaactttaatgctgctgctgccaagattctttttaagggacgcaatgtacatccggggtacgccaaaaataagatgattaactcgatctatcttgccaatcagtttattactctgttgccttctatagaaagaccggaacatacgacaggctacgagggattctatcatttgatcggtattcagggcgaagtggagcaatgcactgtttcttatattattcgtgaccatgaccgggctaaattcgaagaacgtaagaaagagatagaacgcctggttgcccggatgaataccgaatatggtgaaggcactgtaactcttgaattgcgcgaccaatattataatatgcgtgaaaagatagaaccggtaatgcacattattgacatcgcttttgctgctatggaagccgtaggcgtgaaaccgaatgtgaagccaattcgtggaggtacggacggtgcgcagctttctttcaaaggtctgccatgtccgaatatctttgccggtggtctgaattttcacggacgttatgagtttgttcctattcagaatatggaaaaggcgatgaacgttattgtgaagatcgccgagctggtagcttccagatgattttcaattacggatatacctgatatataaacttaatacttaatacttaaaaactgagattcatgaaaaccactccgtttacagagaaacatatagcactaggtgctaaaatgcacgagtttgccggttataatatgccgatagaatactccggcatcattgatgaacatctgactgtttgcaattcagtcggtgtgtttgatgtatcccacatgggagaattttgggtgaaaggtccgaatgcattggcttttctacagaaagtgacttccaataatgtggcggcattaactcccggtaagatacaatatacctgcttccctaatgaagatggtggtattgtagacgatttactggtttatcattatgaaccggaaaaatatttgttggtggttaatgctgccaatatggataaagattgggattggtgtgtgtctcataatacagagggggcggagttggaaaattcctctgataatataggtcagcttgctgtgcaaggtccgaaagcaattcttgctttgcaaaaactgacggatgttgatttatcatctattccatattatacttttaaagttggaaagtttgcaggcgaggacaatgtgataatctctaatacaggttatacgggtgcaggaggttttgaactctatttctatccgagtgcagccgatacaatttggacagctattttcgaagctggtgaagaatttggtattaaaccggtggggttgggagcgcgtgatacactccgactggaaatgggcttctgtctctatggcaatgatttggatgatacgacttcacctatagaagccggtttgggctggatcacgaaatttgtagaaggcaaaaactttatcaaccgtcctatgttagagaagcagaaagcggaaggaacaactcgtaaattagtcggctttgaaatgattgaccgggggattcctcgtcacggttatgaactagtgaatcaggaaggagagaagattggagtggttacatccggtactatgtcgcctacccgtaaaattggtattggtatgggatatgtgaaaccggaatatagtaaaatcggtactgaaatttgcattgatatgcgcggacgtaaactgaaagcagtagtggtgaaaccaccttttagaaaataaagattaaactctattttataggttagcctcggaaatatgtcaacgttttccggggctaattgattttatgacggttactatgaaacatatccgttaatatgttgtttatgccatagaaatattataattttgtcatcaaatacgatgaactaatgtctcaattacctactcttatagctgatctcgcactgatattgatctgtgccggtatcatgactctgttattcaagaagttgaagcagcctctagtgctggggtatgtcgttgccggatttttggcaagtcctcatatgccgtttacgccttcagtaatggatagtgccaacattaagacatgggcggatatcggtgttatctttttattgttcgctctcgggcttgaatttagttttaaaaagattgtaaaagtgggtggttccgctatcatagctgcttgtaccattatcttttgtatgattttgttggggataggagtcggtatgagtttcggatggcaccgaatggatagtctgttcctgggcggtatgattgcaatgtcctctactactattatttataaagcatttgatgatctgggattgagaaaaaaacagttcacagggcttgtgttaagtatcttgattctggaagatatattggctatcgttttaatggtgatgctttccactatggcagtaagtcataattttgaaggtacggagatgttggaaagtatcggaaagttattgttcttccttattttatggtttgtagtgggtatttatttaattcctgaatttctgaaacgttgcaggaaactaatgggagaggagactttacttatcgtatccctggcattatgtttcggtatggtggtaatggctgccaatacgggattctccgccgcattcggtgcgttcattatggggtctatcttagccgagaccatcgaagcggaatccatagatcgattagtgaaaccggtcaaagatcttttcggagctatctttttcgtatcggtgggtatgatggtagatccggcaatgattgtggagtatgccatacctatcatagtaattactctggcagtaattttgggacaggcaattttcggaacatttggagtaattctttccggaaagcccttgaaaacagctatgcaatgtggctttagtttgacacaaatcggtgagtttgcatttattatagcctcgttgggagtatctttgcatgtgacgagtgatttcctgtatccgatagtggtggcagtttccgttattaccacttttctaactccctatatgattcgtctggcggaacccgcttccacttttgttgatgctcacttgccggaatcctggagaaagttcttgatgcgttattcttccggatcgcaaaccgcactcaatcacgaaaatctgtggaaaaagttattgatagcaatggtgcgtattacagttgtttattcgatagtcagcatatctatcattgctctttctttccgctttgtggtaccgttctttaaggagaacttaccccatttctgggcgtcactgttgggagcggtctttgttattctatgtattgctccttttttgcgtgctattatggtgaagaaaaatcattcggtcgagtttgtgactttgtggcatgatagccgtacgaatcgtgctcccttagtttctactatcgttatccggattatgatagcggcactgttcgttatttttgtaatatcgggattgttcaaagcatctatcggcttaataataggggttgctgtgcttgtcgtgttgcttatggtatggtcacgccgtttgaaaaaacagtcaatattaattgagcgacgtttctttcagaatcttcgttcaagagatgtgcgtgcagaatatctgggagaaaagaaaccggaatatgccggacgtttgttgtctcatgatttacatcttgccgatatggaaattcccggagaatcttcttgggctggtaaaacattgctggaactgaatttgggaaagaagttcggtgtacatgtagcttctattcttcgtggaaagagaaggattaacattcccggaggctccgtccgtttgttcccaatggataagatacaagtgataggaacggatgagcaattgagtgtttttaatgaggctatgcaaaatggcgcaaagatcgactgggatgtatatgaaaagagtgaaatggctttgaggcagtttatcatagatgcagattctgtctttctaggtaagacaattcgtgaatcgggtattcgtgataagtatcactgtatgatagcgggcattgaaaatgaggacggtgcgttgatggtaccggatgtaaatgtgccgcttgtagaaggagatgtagtgtgggtggtaggtgagaaagaggatgtataccaattaatcgatcaaaaaagcgaaaaagtacaggtcggataaaaatagaacacctatttttgtttcgttaaaatataaaataattgtatcatgaaaagcgatcctaaagaatgtctgtattgtcagaacaatgaaacgctgcataatctgatgattgagattgcgcagttgagtgtatcacgtgtattcctgtttaaggaacaaacttatcgaggacgttgccttgttgcctacaaggatcacgcaaacgatttgaatgaattgagcgatgaagatcgtaatgcttttatggcagatgtgacacgagttacccgcgccatgcagaaagcatttcaaccggaaaagataaattatggtgcttattcggataaattatctcatttacattttcatttggctccgaaatatgtggatggtcctgactatggtggtatattccagatgaatccgggaaaggtttatttgacggatgctgagtatcaggaattgattgatgcagtaagggcaaatctgtaagtagtaatttcaggcacggattatcctgttgttttgtgtgaccgtttttttataaaacgagcattctgtaattcgtgcctaaaatgacaatatgtaacaaaggaaaccttgcttaggcgttaattcggttagtcttcgctatcgaaatcaaattcaaaatcaaagtcgtccataaattctggtgttgtaaactcttccagatttcgtcgatcttttttggtaggacgtccggttcctcgtgctcggtcaatgaagccgctgatcttactcatttccaatagttcatattggtcaggagttgtgacgttctccatcatttcggggacgagtttggctcctatacgtttttcaattgcttgcagcactttgaatgaatatgtgataggcggctttttaacctgaattacatctcccggctttaccatacgtgcggccttgacgagtgctccatttatggtgacacggccttttttacaagcttctgctgctatcgtacgtgttttgaagatacgtacagcccacatccatttgtctattcttgcttcagccattttagttattatctttattttttattgaactggttcatagtgatatcaattccggcaagacagaaacttttaataatctcacctgccgttgccagcctttcctccattgtcttccagtcttcatctgtgaaatgtcccagtacataatcaatctgcccgccacgtgggaaatcattaccgataccaaatcgcagacgggcataattttgtgttcctaaggttgaggcaatatgcttcaatccattatgtccagcgtcactcccttttccttttaaacgtaaagtaccgaaagggagtgccaagtcatctaccactatcagcacattttctaatgggatgttttctttttgcatccagtagcggacagcaaaaccgcttaggttcatgaaggtggaaggtttcagcaggattaactggcgccctttgactgaaaagctggttgtgaatccgtaacgtccgtcaataaaaggaggagcattattgattcttgccaatgcttctaccgtcataaatccgatattgtgccgggtttcatgatattcagggccaatgtttcccagtccgacaattaaatattttatcattacttatccgtaaaacagttcattaatatagaaaaagaaacgcagattaatacaaactagtacagacttaacatctgctttcatctgcattaatctgcgtttaaagtaaatctctttacaggaatagtctcaaattacttgccggctgcagctgctgcacctcttgctgcacgagtcaacttaacggcacataccacagcttctttagcactcatcaattcaaggccttcaaagctcaattcgccaacttttacagtcttacctaaaccgaggtgagaaacgttcactgtcagtttttcaggaataacgttatacaaagctttcactttaatcttacgcatctgtaaagccaacttaccaccggctttcacaccttctgcaagaccttccaactgtacaggaacttccattacgataggtttagcttcatcgatctgatagaagtctacgtgtaggatagtatcttttacaggatggaattgaatatctttcaggatagcgtttacttttttgccgtcgataatcaagtctactacatagatatgcggagtataaaccaaattacgaagaccttcgttaggcactgtaaagtgaactacttcattacctccgtaaagtacgcaaggtacaccaccgtttttacgaatttctttcaaagctcttgcttgttctgaagagcgttctgcaattgttcttgcagttccttttacttcaattgatttcatttctttaaaaaattgtgttactctaaattaagttagtttgcttaattcaccattacacgatgtggattatcacacgatgtcgcaaaaaagcggtgcaaaggtacggtctttttttgatatatcaaagagctttcttcttaaaaatcaatgtcaatcttgatttccctccccaatttttcctcttttgcttcttcttcaatagcagcttgctctttttccatatctgcttcctgggttaaacggctgatatagtcgttcatgtcattgcgatcaatgaaatcgatagcttctgtcaatcctgccatgaatttctgaaaatcttctctatataagaaaatcttgtgtttttcgaaactcacctgagaatcatcgccttctcccattatcacctttttgctctctgtaatagcaaggaacatttcatctttacggttcttttttacatcgaggtaatagatgcgtttacctgctttaatggacttggagaatacgatctccttatcattcatgtctgcgctcattttctttttaaaatcttccatatatttcggtccgtttataatcggcttcaaaattggatattttttttaaactgtcaaaagaaaaagcgcagagaatcaaatactgcattaaaaaatgtgatttatttgtggaaactcattaaaaatatctacttttgcagttcgataacaatagtataaattgaatttatgatcaacagagttcttattcgtcttaagattatacagatagtatatgcctattatcagaatggcagcaaaaatctagactcagcggagaaagagttattctttagtctttcaaaggcgtatgacctttacaactatttgctaatgctgatgatagcattgacagagtatgcgcaaaagcgtattgatgcggcaaaagctaaattggcacccacgaaagaagaattgtatcccaacaaaaagtttgtggaaaataagtttattgcccaattggaagtcaataagcagctgtccgagtttattgccaatcaaaaaaggacttgggcaaacgatcaggacttcgtgaaggaactatatgagaagattgtagaaactgatatatataaggattatatggcctctgatgataactcatatgaagctgatcgcgaattatggagaaaaatctataagacatatatctttaataatgattctctcgaccaggtattggaggaccagagtctgtattggaacgatgataaggaaattgtagatacattcgtattgaagaccattaagcgtttcgatgaaaagaagggtgccaatcaggaattacttcctgaatttaaggatgacgaagaccaggaattcgcacgccgtctgttccgccgtactattttaaattccgactattatcgccatcttgttagcgaaaatacaaagaactgggaactggatcgtattgcatttatggatgtcatcattatgcaaactgctttagccgaaattttaagtttcccgaacattccggtcagtgtttcgttaaatgagtatgtggaaattgcgaagttgtatagcacatccaaaagcggtagctttattaacggaacattagatggaatagttaatcaattgaaaaaagaaggtaagttgactaaaaactaatacctttgtccatatagtagaaactaaaactgattttttatgaatgtattgactgtattattgcaagctcctgctggtgctgccggaggtggaagtatgatgtggatcatgctgatagcaatgtttgttatcatgtatttctttatgatccgtcctcaaaataagaagcagaaagaaatagcaaatttccgtaaatctcttcaggttaatcaatcggttattactgctggtggtatccacggaacaatcaaggagattactgacgattatatcgtacttgaaattgcttctaacgtaaagataaagatagataaaaactctattttcgctgacgcttcggctgctagtaatcaatctaagtaaatggtaaacaatgcctatgcttgatcgtaggaaaataaggtacacatatttaaaactatccaagaaaattaaggacttcctgcttagcgataagagcagggagttcttaatttttttgtttttttttctgatagccggtggattctggttactccaaacgttaaataatgattatgaagcggaattttctattccggtacgggtaaaagaccttcccaataatgtagtgctgacttcggaacctccttctgaacttcgggttcgggtgaaggataaggggactgtgctgcttaattatatgttgggaaaaagtttttttccagtcaatttaagttttctcgattataaagggaaaaataatcatgtgaagatttatgcatccgattttgagaaaaagatactaagtcagttgaatgtctcttctaaaatactctcgataaagccggatacattagaatacatctattccgagggaaaatccaagttagtacccgtccgtcttcaggggaaggtaactgccgggcttcaatattatgtttcggatacaatttgtaatccggattctgtgttggtgtatgcgcccgaagggattttggatacgattactactgcttatacccaaaaaataaatctggagaatatttcggataccactcggcaacgaatatctctggctccgttaagaggagtaaagttcgttccaagttcggttgaggcgacatttccggtagatatttatacggagaaaacagtcgaagtaccgttacatggaattaattttccggcggataaggccctacgtgcatttccttctaaagttcagataacttttcaggtaggattgaagcgttttcgtagtattaaagccgatgattttgtgataaatgtctcttatgaagaactgttgaagcttggttctgataaatatacggttaaattgaaatcatttccgaatgggataaatcaaatccgtattgtacccgaacaagtagactttttgatagaacaagtatcttctttttccgatgttgattaaggttggtataactggtggtatcggtagcgggaaaagcgttgtttcccggttgctggagataatgggtattcctgtttatatatcggatacagaagcgaaacgtattacttgtaccgatacagtgattcgccgggaactttgtgctttggtcggtcaggaagtatttcaggggggagaactgaaccggactttattggcggagtatatgttcgggtatccggagcacgtgaaagaagtgaatgctattattcatccacgggtaaaagatgatttccggcaatggacagtccgtttcgggaataacggactggttggtatggaatccgctatccttattgaatccggttttagagaagaagttgatttccttgtaatggtttatgcaccgttggaagtgagagtagagcgggctatgaaacgtgactgttcatcaagggagttggtcttgaagcgtattgaggcacagatgagtgatgaggccaagcgggaacaagccgattttgtgatagtaaatgacaatgaaacaccgttaattccgcaggttttggagcttatttctttgctatctaaaaataatcattacctttgcgacgctaaaaaataattaataaataaaagaatatatactatgttgaagactatcttgtctatctccggaaaaccgggattgtacaaacttatttcgcaaggaaaaaatatgttgattgttgaatcaatcaatgctgataagaagcgtttccccgcttatggtaatgaaaaaattatctctctggcagatatcgcaatgtacacagatgatgcggaagttcctttgtatgatgtgttggaagcgatgaaaaagaaagaaaattcggcaattgcttctcttgatccgaagaaggctagtccggaacaactccgtgaatacttggctgaagtgttgcctaatttcgatcgtgatcgtgtgcatgtaggagatatcaagaaattgatttcctggtataatacgttgatatctaatggacttactgaatttaaaccagaagcggaagttggggaagaagaggcagtggcagaataataattaatgtcatttgtctaaatgagactaaagaacatgataatcgcatttaatgtggttatcatgttttttttatagagatgtttgtaaattcagaaaaaaattagtataatttgggtaatcttttattaaaataaatatcttctacttatattgtaaataatggtgctttttatgtatctttgtcgctgttctctatttttcacgatgtctatggcagttaaaatgaaaatggacaacaaaagcgtttaaagatattattcgatgcttgagttatccagtgacctcaagtatgataaattgtgtagttctcacgcttttttataattaatcaccttccagggaacaggaggctttatatagggaatggagacaataacgaataaaggagtgaatatctgtttggataatgaatcaggggagttatgcttgactaatttgttatcaggtacaatggtatttttatatgattctcaaggagaattaagggaaaaacaccaatttgctttacctttgcttaccataacaatttctagacagggtacttatgttttagtgatgagtcatccgaactgtcagtctgaagttcggaggattatctatacagggatataaaaagaagtcggtaagtttcttggcaaacctaccgacttcttattttttgtattgtgtttaatttctgaatactaatccgtctccgccagcatcgacaatgatcgctttacttcgatctacttcctgagctagcagtttcttagacaggtcgttcagcaaatagcgttgaatagctcttttcaccggacgcgctccgaattcaggatcataacctacttgtgacaagaagtttaatgcagcatctgtcatttccaattccacaccgttttcagcaagcattttctgtacgctcttgatttgtaagaggacaatttgcctgatttcattttctgtcagcggcaagaacataattgtttcgtcaatacgattcagaaattccggacgaatcgttttcttcaacatattcatcacttccttcttcgtttcttcgattacctcttccttattagaaccgttcagtttctccatttgactttgtatataggaacttcccatatttgaagtcatgataatgatcgtattcttgaagttaactacccttcctttattgtctgtcaatcttccgtcgtccaatacttgcaacagaatattaaaaacatccggatgcgctttctctatttcatcaaacaacacaacagagtaaggtttccgccgaatagcttctgtcaactgaccaccttcgtcatatcctacatatcccggaggtgctccgaccagacgtgaaacactatgcttttcctgatactcactcatgtctatacgggtcatcatcgtttcatcatcaaataggaattctgccagtgctttcgccaattctgtcttacccacccccgttgttccgaggaagataaacgaaccaatcggacgtttgggatcttgtagtcctgcccggctacggcgcactgcatcggcaactgcctcaattgcttcatcttgaccgattacacgttggtgaagttcttcttccaaatgcaacaatttatctttctcgctttgcagcattttgctaaccggaatacctgtccaacgagaaacaacatcagcaatatcttcggcatctacttcctcttttatcattgccttgtctccctgcatatcgcgcagcttcttttgagtatcctcaatttctttatccaatgcctgaagttttccgtaacggatttcggctactttgccataatctccttcgcgttcagctttctcggcttcgaatttcagattctctatctctactttgttctgttgaatcttatccattaacgtcttttcgctttgccatttagctttgaaagatttttccaattctttcaattcagcgagttctttaccgataatctccagtttcggtttgtcgttttcacgtttgatagcttcgcgctcaatctccagttgcttgattttacgggagatctcgtccagttcttccggtacggaatctacttccattcgtaatttggcggcagcttcgtccataagatcaatagccttatccggcaagaaacggtcggtgatgtagcggctacttagctccacggctgcaataattgcgtcgtctttgatacgcacatgatggtgattttcgtaacgttctttcagtccgcggaggatagaaatcgtgctcagattatccggttcgtctacttgtacaatttggaaacggcgttccaatgctttatccttttcgaagtatttctgatattcgtcaagggtggttgcaccgatagagcgcagttcgccacgggccagagccggttttagaatatttgcggcgtccatggcaccttcgcctttcccagcacctaccaatgtatggatttcatcaataaataagataatatcaccttccgacttcttcacttcattaactaccgatttcagacgttcctcaaactcacctttgtactttgcaccggcaacgagtgcacccatatccaacgaataaacctgtttgttcttcaggttctcgggtacgtctccccgtaggatacgatgcgctaatccttcgacaatagctgttttacccgtacccggttcaccaatcagaatcggattgttcttagttctccggcttaatatctgaagtacccgtcgaatttcttcgtcacgtccgattaccggatcgagtttaccgctacgagcagcttcattcaggttaatggcatatttttccaatgattgataagtgtcctcactggattgtgacgttactttttctcctttccttaattcgctgatagcgttacgcaactccttttccgtcattccggcatctttcagaatggtggatacagtgctttttacagtgagcaacgctaacagtatatgttccaaagaaacaaactcgtcgcccatttcctttgaatactgggttgctttctgcaatacatcatttgcttcacggctcagatacggctcaccaccggaaactttaggcagcgaatcaatctgtttgtcaacgacaaccgctacttgctgtccattcatacctaacttttggaagatgaagttcgtaacgttttcgcctaccttcatcaccccctgcatgatgtgaacgggttctatggcttgttgcccccggcttttcaccagatttacagcctcctgtatcgcttcttgggatttgattgtaaaattgttaaagttcatatcgttgttctcctttctttttcatgtttctaataacacttaaaagggcgcaaaagatttgccaagtagaaaaatgtgacaaaatagcatgattataaggagcttacaggacaaaatggcttctttttccagtgtatgactgacgaatttgctgcgaaatgaggaggataaataaaagtattgtagtatctttatcggctgtaatgttattgtaaataagatatgaacgataaacctcaaataaaactgtctgaaacagtagtgctgattgatgcagcttttctgaactttgtaattacagatatgaaaggatactttgaagatactttgcaacgttctttacaagagatagacctttcgatactgactacctatcttactttggacgccgggattacggaagggaaaaatgaagtccaatttctttttgtttacgataaggagtctgggcggcttgtacattgccggccttccgatctggagaaagaactgaacggggttgcttttcaaagcccttatggagaatattcatttgccagtgtcccttcggagggaatggtgacaagggaagatttattcttggatttgctgtctattgttgccgattcggctgatgtgaaaagaatgattgtgatttcctttaatgaagaatacgggaagaaagtggctgatgcgctgaatgaaataaaagataaggaagtgattcagttccgcatgaacgaaccggatgctccagtgaagtataaatgggaaatgttggcttttcctgtgatgcaggcattggggatcaaagctgacgaactacaataatatcagttcctatatttgctgactatacctatatatttaatacttaaaatttagccctgtgtctgattttcgtttaaaagtattccaaagtgtagcgaagaacctgagttttacgaaagcttcgcaagaactgtttgtaagccagcctgctatcactaagcatatccaggagttagagacttattatcaggctcgtttgttcgagcgtcagggaagtaaaatttcgctgaccgatgcgggggaattgctgttgaagcatagtgagaagattctggatgattacaagcaactggaatatgaaatgcatttgttgcataacgagtatattggtgaattgagactgggtgccagtacaacgattgcccaatatgtccttcctcctttattgggaaatttcatagctaagtttccgcaggtcaatctttctctaatcaatggaaattcccggggagtggaaacagccttacaggaacatcggatagatttaggtttggtggaaggaatctttcgtctgcctaacttaaagtatacttcattcttgcaggacgaacttgtagcagtggtgcacgcgcataccaagctggatattcaggatgagattactccggaagacttgccgaatattccattagttctgcgcgaaagaggttccgggacgctggatgtcttcgaacgtgctttgtcgcagcataatctgaaactgtcttctttaaatgtaatgatgtatctcggcagtacggaaagcattaaacttttcctcgaacatactgattgtatggggattgtatctatccgttccgtacataaagaactcgttgcaggtaatctgcgtgtaattgagataaagggaatgcctatgcagcgtgaatttaactttgtgcaactgcaagggcaggaggggggattatcccaagtctttatgcggtttgcgggacatcatagtaaaagtctgtaatcggcttttccgttacttttacatacagattaacttcccagcatttcaatgcgttacgatgcaacaaaatggcgggaagttggtcttgttttttagtaatgtgtagcaccagaaaagatttttcaatttcatttctcatattctcatataaaaagttatccttctgattactaatcatataaattatgagaattaaaatgtttacatgtatttctcataatttattcaagaaaacacgcttaaaataccgcatttctcatactatcattggtatttctcatactattgcaaacgttattctcatcatccaatcatcaacacttaataaactgtagcaaaactattgttcatcttcattataactaactgacaatcaaagaatatcctactgaaatcaatagattttcaataagaaattcctatcgttgcactccagtaaacaggcttgtgcactggagtgaatagggctatctacccgagtgcaccgatctgtttactagagtgcaacaatgcggatgaaggaaagaaaatacaatgatgccggttgcgaaagatatgtcatctaccgatttaacatataaactacggttatattgcctcctacatattagtccctttatttccatcaagcaggggtgctttgcattttccctttttctccgttggcttcgtttggcatcataaacgctttattcataagccattcaatgccatttctcccattttattcgtttattccagagattctgggtaagtttgctcatactctgtataaaatctcatatttcttttttatctttgttcttatatcatcaaatacaagaacttaatggataagatcaccatatatcttctggaagaaaagcaagctaaacgaaaggggggcttatatctggaaatggtagagtaggacgattgatcatgttccgtgagtgtctttgccatgacgtagttccgtttattatagacgagcggcataagcagttttattataggggacttagagagtttgcgtctactcccggatatttgcttgatacttgccttttggcgcaagatatttatgtagcatgggtgaaatatttctattctggattatttgactgatactcatagaaaattaaagaattaaaaatcaatggataatggatatagaaaattataaattacaatgatttcttgatgtccggcaaggcaattataaacgtgcttttacttattagaatgagacggacgagatgactaaaaggaatttatatatataattaaatattactattatgggctgttttatgaatcttttgtggctgttgcttggtggaatttttacggcggtagaatatcttatctcaagtttattaatgatgattactatcatcggtattccttttgggatgcaaacattaaaattggcaggacttgctttatggccttttggcaaggaagttagaagcggaagtcgttccggcggttgtctttatatactgatgaatgtaatatggatatttgtagggggtatttggatttgtttgtcacatttgctttttggggcggtgttgtgcataactattattggtattccttttggtttacagcactttaagttggcggcattagctttatcacctttcggaaaagatattataactgtgtaaggatagttctgaacagattatctataactaaaagttataatatataattagaaactattagtgtgtcttgattgtttcctgtacctttgcaccccgaaaacaattaaagataaaatatatgatttcaacagctacaaaaacgttgcagggaaacaacaaaaccatttatgttgcactactttctactttgactttctttctgtttttagactatattccggggttggaggcatggtcggcatgggtgactcctccggttgctttgtttcttggacttatttttgcgttgacttgcggacaggcacatccgaaatttaataagaaaacatctaaatatttattgcaatattctgttgtcggactgggattcggaatgaatctacattcggctctagcctccggtaaagaaggtatggagtttacagttatttccgtaatcggtactttagtgatcggttggttcatcggacgtaagttgtttaagatagaccggaacactgcctatcttattagttcaggaactgctatttgcggtgggagtgccattgcagccgtaggaccggtgttgagggcgaaagatagtgaaatgtctgttgcactgggtactatttttattttgaatgcgattgcactttttatcttcccgatgattggtcatgctttgagtatggatcagcaacagttcggaacttgggcggcaattgctattcacgatacaagttcggttgttggtgcaggcgctgcttatggagaggaagccttgaaagtagctactactatcaaactgactcgcgctctctggataattcctatggcttttgccacttcatttatctttaaaagtaaaggacagaagatcagtattccctggtttattttcttctttgtgttggcaatggtggtaaatacttatttacttgacggagtgccgcagttgggagctgcaatcaacggaattgcccgtaaaacattgacaattaccatgttctttatcggcgcttctctttctcttgatgtgctaaaagcagtcggaattaagccattgttacagggagttttgctttgggtagtgattagcttgagcacgttggcatatatctattttgtataaggaaaacacacaaatgatatatagaaaagtgggagaatattcgtaccatacgatattttcccactttattttgatgcagttccgtcttaaaaagacggaggagatccgcttattcttttttcttcaatgcttcaaaaatcaagccctccagttcttctgcaagctccggattgtcagcaatacattgttttgcggcatcgcgtccctgacctagctttgtatcattgtagctataccatgaaccgcttttcttgataattcccagatcggcgcccaagtcgatgatttctccggagtgggagataccttcaccgaacattatgtcgaattctgctctgcggaaaggaggtgctaccttgttcttcaccactttcactttagtcagctttccgagtacctcttcgccgtctttaatcgcttggctaccgcgaatatccaaacgaacggaagcatagaacttcagtgcattaccaccagttgttgtttccgggttgccgaacataacaccgattttctcgcggagctgattgataaagatacaagtagtacgtgtcttgctaacggctgctgtcagtttacgtaatgcctgcgacatcaaacgtgcctgaagacctactttgttgtcacccatatcgccttcgatttcagctttaggagtcaatgcggctacggagtcgataacaatgatatcgatagcggaggagcggatcagttgttcggcgatttccaatgcctgctctccgttatccggttgggaaatatacaaatcgtcaatgttaactcccagtttggctgcatagaaacggtcgaaagcgtgttcggcatcaataaaagcagcgataccaccggctttttgtgcttcggcaatggcatggatagccaatgttgttttaccggaagattccgggccatagatttcgatgattctacctctggggtaacctcctacacctagtgccacgttcaaggcgatagagcctgtcgggatcacttccacttgttcaacactgtcgtcacccattttcatgatagaacctttaccgaagctcttttctatcttttccatggcagcctgtaaggcttttagtttttcgcttgatgccattttattatctgtttcaaaattaagttcgtctttctttgccataccttataattaatggaattattgatttaaaatctgtgaggcatgctctttagtctttacttctttcggagtgataatccgttccacaattccttcttcgttaataaggaaagtggtgcggaaagtacccatataagcacgtccgtacagtttcttttctccccatacgccgaattcttccactaattttttgtcagtgtcggctatcaacgtaaaaggaagattgttcttttcgataaacttctggtgcgacttttcattgtccacgctgacaccgattacttcgtaaccggctttacgcaattctgaatagttgtcgcgcagattacatgcttgtgccgtacaaccggatgtgctgtctttcggatagaaatacaacacaatcttttttcccttgtaagcactcagacggatttcttcacctttctcattgatgcctaatacttccggtgctttatctcctacgttaatcataactttctttttaatatacgactgatctcctacaactccagatctttatcgaacacttcgtgccaaggcaaaccttgcttgttcagttgttccatgaacggatccggattaaattcttctacattgtttacgcccggacgtttccattctcctttgaagaacatcatggcgccaatcatggccggaactccggtagtgtagcttactccttgcatacctgtttctttataggcttcctgatggctgcaattattgtaaacataatacgtacgttcttttccatctttcagaccacggatgcgacaaccgatagaggtttctccttcgtagttctcgcccaaatcctgtggattaggcagaacggctttcaagaattgcagaggtacgatcttcactccgttgtaatctacttcgtcaatacgagccataccgatgttctggataacacgcaggtgggtcagatattcctgtccgaaggtcatccagaaacgtgcgcgtttaattgtcgggaagtgtttcaccaatgattccagttcttcgtgataaaggagatatgaatcgcggggaccgatattcggataagtcaggtctttgtggatttccagcggaccggtagttacccattggccgttttcataataacgtccgttctgggtaatttcgcggatattgatttccggattgaagttggttgcaaatgctttgtggtgattgccggcattacagtctacgatgtccagatattggatttcgtcgaaataatgcttggcggcgtaggcggtatagataccgctcactcccggatcgaatccacagccgaggatagctgtcagaccagcttctttgaaacgttcatgataagcccattgccaactgtattcaaaatgagcttcatctttgggttcgtagttggcagtgtccagatagttaactccggctttcagacatgcttccataatggtcaagtcctgataagggagggcaacgttaatcaccatttcaggtttgaaattgttgaataaggctaccaactcgtccacattatctgcgtctacttttgctgtttttatattagggttacctattgcctcgacgattttgtcgcatttctctttcgtacggctggcaatcatgatatctgtaaatacatcggcattttgtgccactttgtgtgcaacgacagtaccaacaccgcctgcaccgataataagaactctacccatttcgttaattgcgaattaaatattaagaatattagaattgttagcttggcaaatatacgtgattattttcagataatcattcgccgatactcctttttatttgaaacgttgcaagatgccgctctcgaattccaatgtttttccgttatagaaccagttctcaaaacggttatcctttttcagtactatttctatcgggtcgccgatagacagccggcattcatccgtactcatgcctacttcgaggtcgccccgcgaaatgatttgccaacgtttctcggtaatgcccggatattttttatgtatatcttcaaacccgaaaaggtcttcaatataattgttgtttctggtgattacgtcatacttcaagtcaaccttcatttcgtaactaattccattcttgtcttttaatgtcaaaatagccagactgccgggagagggcatccgaacttcttttattgtcaggatagtgtaccggggaagatgaacgcgggactccatttgtttgttttcaagagagacagctcttttggcagacaatgtttttttaggataaacggttgcccccaagtacctgtttttcaggctttcgatattatccagcttcttattcgtaaaactgatcgaatttgaaaagtatttcattctcttttcaccttgaaaatcactcgtgtccataccggagtttgtccgtgagagggcgacttccagataataggaatgtccctgtgtgtctttgaatatgattttcacgggatatgcctggctgcccactccgacggccgtgacagttgcttccgtattgacggaaataggtatatcccgatagccggaatagctgttggcatcatccacacggacagtttcggattgtatgtatattgtctttcctatcagcagatcttttgccgtatctacatcttgcaggtaaactaatccgttgatgcaggcacggggcattctttcgcatatctcgtccaaccgcatattctttatgtcataataatatttttccccttcatcttcgaaaacgaagcgggtggtgtagtttgtttcatctgctattttttgaaccttctcttcggttccggtgaaagtgagtattttgtgtctcatcaggctattatccactcctttttcggtgttgtatattaaaagggtaggaagaaacatttcccgtgcggaaggagcaaacatgaatttcattccgggagtccatttacataaaggttttagaggaaagtgttttatgataaactgttcttcttcacttgcaggaatttcctgggcggagggggtagtgacaatgtaatcactttgggcggtaacatgagacataccacaacagaataaaatcacggataggacgattgttctcatatttatttctttaagtgaactatgtaaattgttcatttgttgtatattcaatggcaaatgtatatattttatattgtattgggtgttatttcccaatctttttggtatctttgtccacgatttaacttaaacgttataacaatatgaagaaagtttttgtttcaatttgcgttgcaggtgcagcacttgcaatgtcttcatgccgttcggttgagaaggcagttcctgtgtcatctatcaatggtgagtggaatattgtagaagtcaatggctcgaaagttgctccgggcgaaagtagaacccttccatttattgcatttgatacggctaccggtcgtgtgtccggtaatagcggatgtaaccgtatgatgggcacattcgatgtaaatgcgaaaccgggaagccttgagttaggtgctatggccagtactcggatgatgtgtccggatatgactaccgagaagaatgtattgagtgctcttgcacaagtgaaaggatataagaaagcaggtaaggggaagatgtatctttgcaatgcttccaatcgtccggttgtagttcttgaaaagaaggaggctgatgtgaaactttcagtgttgaatggagaatggaaaattaaagaagcaaatggtgaggcgattccttcaggaatggagaaacaaccgtttatcgcttttgatgtgaagaaaaagtctattcatggtaatgccggatgtaacctgattaacggaggttttgaaactagtacgagcaatgccaaatcgatttccttcccgggagtggcaagtacaatgatggcttgtcctgatatggagacagaaggtaagatcctgaaagcgttgaatgaagtaaagtcattcgatgtattggcaggcggtggcattgggctgtatgatgccaataatgcattggttattgtattagagaaaaagtaattattataagaaataggaaaggctgtattaataaagcctgatatttatgaaaccggcctcattgctatctgttgcagtgaggccggttttttgtttcatgaactaattaatagtggaagctgattgttacaattgcttcaatgcttcccaatcaatttccggttctttgcctgttggcttgcaataaaacttagttcccattggaacggattcgttaaagaagcctcccattttcagataaaaccgattgtctttagtattgccaccttgatagtcgagacggacttgggcactcgctgttgcatcgtgtgtaaaggtagcgtcagtgagtcgggaccatttaccttctttgctacgtgcccattggttgccgaagaaaacttcacgtgataaatatccttgttccggactgaaattctcaaggaagctgtgaggacgtttataccatgtgttggttttggggcgtaagaaactggctattaatttccattctttctcatctgttgcatagaaataggcagtgtaggtcgtatttccattcccgtccggtctgatttgcatcagaaatttatatgtattaccggctttccagggatacttcaaataactttgtccgcctgagccttcgttgccaaactctccgatgtgtacatctttgccttggcgtaacagtttaatcttttggtcatccggaatctctttggggttttgtgtatcaaaaggactccataccgagaaaagaatacggcgttctgtcggggagttgtattgcattccgaaataaccttccccgaagccggccgccatgtagtagctatgcattgtttcgccttctttgggcactgtgatttcattgtagaaccattcagtatcaccttcaggtagcgcatatcccaaatgaacggaaggaccgcggcgtccccaatagtcagagaagtctttcacataattacttttacctgtaacattgtctgctatcaactgcttaatttctccgaaactctcaccacttttagagactccttgtaagtcgatacggacataccctgcctgtcgtatatcgatactcccaacaggaactttagtgaaatcatccgattgtagattgactttgaagcccttctttccataactgactttgatttcggaatggcctttggcatacagtgacagatcggctgttgtcggttgatgcaaatagaagtaaatactaacgatacttttaggatttgtccaatgtgtaactcctctttgtgttattcgcgcaccatcttgttgccgggttacatagccattgccggaaactcctacgacaacttgttgaggttgtgcaaatacggtagtgcatagtagtaatgcaagtaaacataataaatttttcatgtagatgtcattaattgattttatgtataattccgatattaataaatagttcgttgttttatagtgtaatattgcaaagttaagaattaattctctttatcgaaccagaatagataatatttgttttagtgtcagtcactgaataactttctttatggctatcatggcaaggaagtttattaaaaactgtcgttttggcagatattatgtcatgcattcgtataatttctttttggcacacggtttgctttttaataagcgtccgttcgagacgaagctccataacaggagtggagaaacaaccggacaaaaagaaatcattgaataataataaataaaaaaataacgatcatgggaaaaattattggtattgacttaggaactacaaactcttgtgttgctgtatttgaaggtaacgaaccggtagtaattgcaaacagtgaaggtaaacgtactactccttctgttgtcgctttcgtagatggtggcgaacgtaaggtgggcgaccctgcaaaacgtcaggctattactaacccgacacgtaccattttctctatcaaacgtttcatgggtgaaaattgggaccaggttcagaaagaagttactcgtgttccttataaagtagtgaaaggcgataacaacactccgcgtgttgacatcgacggacgtctgtacactccgcaggaaatttctgctatgattcttcagaaaatgaagaaaactgctgaagattatcttggacaggaagtaacggaagcagtaatcactgttcctgcatatttctctgactctcaacgtcaggctacgaaagaagccggacagattgccggtctggaagtaaaacgtattgtgaacgaaccgacagccgctgctcttgcttatggtctggacaaggctcacaaagacatgaagattgctgtgttcgaccttggtggtggtacattcgatatatctatccttgaatttggtggtggtgtattcgaagtgctttctacaaacggtgatactcaccttggtggtgacgacttcgatcaggtaatcatcaactggctggtagaggaatttaagaacgatgaaggcgctgacttgactcaggacccaatggctttgcaacgtttgaaagaagctgctgaaaaagctaagatcgagttgtcttcttctacaagtacagaaatcaacttgccgtatatcatgccggtaaacggtgtgcccaagcacttggttaagactttgactcgtgctaaattcgaatctttggctcacggattgattcaggcttgtcttgaaccatgtaagaaagcgatgagtgatgcaggcttgaacaatgctgatattgacgaagtaatccttgtaggtggttcttcacgtattccggctgtacagaaattggtggaagatttctttggaaaagctccttctaagggtgtaaatccagatgaagtggttgctatcggtgctgctgtacagggtgctgttttgacagacgaaatcaagggtgtagtattgttggatgtaactccattgtcaatgggtatcgaaacattgggtggtgtaatgactaagttgattgatgctaatactaccattccggctcgtaagagtgaaacattctctactgctgccgataaccagagtgaagtaacgatccatgtattgcagggtgaacgtccgatggctgcacagaacaaatcaatcggtcagttcaacttgtcaggtattgctcctgctcgtcgtggtgttcctcagattgaggttacatttgatattgatgcaaacggtatcttgaaggtatctgcaaaagataaggcaaccggtaaggaacaagctatccgtatcgaggcttccagtggtttgagcaaggaagaaatcgaaaagatgaaagctgaagctgaagctaacgccgaagcagataagaaggaacgtgaaaaaattgataaattgaatcaggctgacagcgtaatattccagactgaaaatcagttgaaggaattaggtgacaagttgcctgctgacaagaaggctccgattgaagctgctttgcagaaactgaaagatgctcataaggctcaggatttggctgctattgatactgctatggcagaaatcaatactgctttccaagctgcaagtgctgaaatgtatgctcaaggtggtgcacaacaaggtggcgcacaggctgggcctgatatgaatggcggtgccggtcagcaagataatggaactaagcatggagataatgtgcaagatgctgattttgaggaagtcaaatgattccgataaggatacagataataaacaataagcaaaagcgtgcaactcaatgggttgcacgctttttgcgtttatggggttcatggttgctatgtgttttctatgggcttttttatctcttatttgcgacatgtttgcgacacgtcttatttggcgataaggtacaacttaaattgatataaaccatttaaaacgagaagaatatgccaagaggaaattacactattcaaagaagttgcgaggagtgcggtaaaatctttactcctccgacattgatgtcaaagtattgttgtcctgcttgttccaagagggcatacaagaaaaggcaaatcacaccttgtaaggatgatgttttgaaacgtgcgttcttgttctctattctcactggattgcggcatagtgatattcaaactttgaaatggaaacaaattcagcagacgagtaagggaacatggcaagcagtcgtagtacagcagaaaacgaaagtacccgattacaagccagtcatccaacaagctctccagctatgcggtgaacgcccaagcaatgacgaagctctcgtttttgaaggattgactgatgcctcttggatttctcgtcctctgaaagtctggatagaagcatccggcatcaaaaagcacatcaccttccattcaggaagacattatgatttgtctttccccttgaaaatgaacagcttgtaaagatctctttcttgacaggtaacgatttagaaacgagcgaagttctatgttctgccctattttacctcatattaaaagaacgcctttttacaatgcaaagatagtgattagaattgggttataatagatttcagtctacaaatagagaaccccatacattttttattgctcaattactactaactttactaaaaatgagtaactttgcaatctaacaagtatgagcgttactatggttgtaaaaacaataaaattgacatctttatttgtcaatactgaaaattacagatttgagcctctaacttcgcaaaaggaagcgatagacaagatggtagaggatcaaggggataaattatattttcttgtagacgatattgtaaccaatggtcttagtccagttgatttaatcattgtaacgcctaacgaagataacaacaaatatatagtgctcgaaggtaataggcgaataacatcattaaaattattaaataatccaacattagttgatgacaagtacgtttctttaaggaagaaatttcagaaattgcaaaaagaaaatcctaatgctatttctgaattgaagaatacctcaaatccgcaactacgcgcctaatatgatacagaagcgaaaagaatctgcatcgttagtaaaaagggggcacagtgcatcgaatgtcaccataaagacatataaatgccccttaccccaccatgcgacttgaggcaatacgcaaaatcacgactataagttgtcggtgttatccaaagtcattctggaacacattggcataagcattgttgcatgaatagatattcagcacatacttccttgatgtcctgacccatttggctggcacagagatgaacttaaagacaaacgtcttgatgcggcttgttgctttgagtccgaacctcttcacgtcaagcctcgccatgatgaatttatagaagttgcgtatgagtgccataagcagaagaaacaccgtgttttctcccataaaggattttggaagcctgttccagccgaatccgttattcatatcatcgaagatgcgttccttccctccacggaggttatagaattcgacaatctctttctcggaagactcgtagtcatttgtaaggatgcagcggtaggtgtattctccttcccacaggtcgagttcgccgtctatccgcttctgtctttgaatcacaagacggtatgccttccctttccatttctcgatgagaatggaggccagctcaaactcaatgccgcccaattccactttcttccaacctctgagggcaaagatgtcattgtagagcgaactgcatcggttagcacggatatagaaggtcttgcagtgtttagcaatctcttccactatctcttcagaacacgagccgcaatcagctctgaaacggttgataataagcttgttttgttcaaacctttcaaagaacctcttcagcgtgtccttctggtggaaacggacatttgtgttgccgtcgctgttctcaatgccgacaatcaagttgccaataaccgccacgccagggcgataaccaaggaacttcttgtatgtaggcttcgcatcaaacttctcagcctctatgaactggtggtcgaagtcaacgtcatacccctcgccctctttcagctgccctgtggacaataggcaattgaggagcagtgtattcagcttgtctgccgtgttgaagtcgtaggtcttgccagtgtcggatgtgtaggaaatgttatcctgggtcagttcctttatggctctaagaatcgtgtcggcactgcatgtgcgaagtgtcggatgaagcgaaaggtggtacatcagatgagtggtgacatcctcgatgcatgagccgccacaaaaataaacgctcataagcgaacggatgatttcgctgtattgataaccatacagcctgcatctcataccgagggttgagtcgattacagatgagagtctggagtcaaattgctccattattgaaaatattcctccaaaaggagtgagtttctcggatttaattgctacctttgccatgtctgtcgggtttgatacatattttgatttgcaacactaagataggtgaaaaatctgacatggcaaattcctgagcaactttttgttgctcaggtacttaaaaagttatatttgtaatagtgttgcggaattaagggaatattacttgcgctgtttttgaaaacccaactgaagctgatatttggataaaacgtaaacactcgggagagctgaatggtatcggtactgttacttggaatgctcaacaaaagcaaagattcgaggagaaaacagaagggaaatcatcgattccattgcaaattatcactttgttgaaatcacaagaaaatgtttctgatacgattaaggattcgttatctaaactaaatattaccaacttgcaacgtttgatgtcagacccatatgttagagaacaccttggtttgggaattaacaatggaactttagtttcaaaggttgaagtgtcagaagtcgtcaaggggcttataaaagttgttacggatattcttaatccggaattcaaagtttcagaaatctataatagagaaaaaagaaagcaatatattgacaattttgacacgaaccaaaagccagacctatctaatgaagcgtctgaacaatggagcgttcaagatattgtaaacaataaagggccggtattaataaatagtgaacctagagaaataaaaaagactaataataagaaagcaggaaacagagctggcttagtacccaaaactttgattttgcatatcaacaaccccaaaatcaataaaatttttgaggagttaaaacaagtccaagtcaaaacatgtcctaatgcatcttctgtactgctgagagtgtttttagaattgtcagttgatgcttatttggaaagatatgatttggtaaaaaacaaagctataactgcgtgttcttccaaagaggatttgaacgggaaagtttgtaaagtattaaatcatatgactcagttaggaacaatgagtaatgatttatctaaaggtataagggctgaaataaatgataaaaactcagtcctatccattgagtcattgaatgcatatgttcataatgagtttttctatcctaaagcagataatttgattataggatgggacaacatagaaagtttttttatccaattgtgggaatctataaataaagaataatattatggagtttttatcacctctaagatatcccggtggaaaggcaaaagtcgcagatttcgtacaatgtttactcaaagaaaatgcattgctcgatggtacttatgttgagccatatgtaggaggtggttctgttgctttatctttgctctttaatgaatatgttagtgatatatatataaacgataaagacatatctatttatgccttttggtatagtgttcttaatagcacggatgctctttgtcaattaattaaggatactcccataaatgtcgaaacatggtttaagcaaaaagagtttcagcagaataaagaaaatggaaatgttgatttattaaatttagggttctctacttttttcctaaatagaacaaatcgttctggaattttaaaggccggaatcataggtggatacgaccaaacaggaaattacaagattgatgcaaggtttaacaaggaagatttgataaaaaggattcaacgtatagcagactacgctgatagaattcatctaacaaatgacgatgctgttactttagtacaacgattaaaagatgaattaccttacaatactctattatatttagatccaccctactatataaaagggaaagggctttatctgaactactataatgacacagatcatcaaaatatcgcaaatgctataagtgagatagtaaattgtaagtggattgtctcttatgataatgtgccattcataaccagcctatattcaaaatatagacaacaatgttttgaattgaattatagtgcgagtaactcagggaaaggtgaagaaataatgatattttgtgacgatatagttattcccaaacacaaattatttaatcatttaacaaagtgaaaataactcacattcatatcgaaaggtttcgaggcttccaaaatgaagactttgaagtaggctctcaattaacagctattgcaggacaaaacggaactcaaaagtcaacattacttgctattgtaacacaaaccttcactcttaaggcagaggatccaatgagagcggaaaaacctttgtgtggcggtagctatatttctgcattcaaagataagtttagattatcccctacttttgataggcctaaaggtcatgaatggaccatttcctttgatgctggagtagatgattttaccgttgaaagcattaaacgtactggagaccccaatgtgcgattttggaagaaaggagcaaggcaagaaggagatggatatctctcttttcccacaatctttttaagtttaaagcggctagtccctatggcagaggaagccaaaattataactgatgacacattattaactccagaggaattaaatgagttcaaacaattacacaataaaattctaatagtacaaacccctatttcttctgcaacaacaataacttcaaaaaacaagcaatcaataggtgtatccactgaattatacgattggaatcaaaactctatgggacaagataatctaggtaaaattatcttagcattattttcttttaaaagattacatgacaaatatcccccgacagtacaaaggcggtattttggccattgatgagatggatgctacaatgtatcctgcatcccaagttgagttattaagaattttacgtagatatgcatcaaaactgaatttgcaaattttatttactactcattcaatgtctcttcttaaggcgatggacgatttagttcaagaagtaaataaaaaagaagaaacagccaaccaagtaaaagttctctaccttaagaaggttgatgataagatagcaattaaacaaggtgtgaacttcaaaggtattcagttggacttaaatgttgttgcagaaggtaacaatcgcaagaaaaacaaaattacagtatataccgaagacaaggaaaatatattatttgtaaaagctatattaaagactaaagcttctgtgttggattttgttgatgtaactttgccatgttcaacattaatggaacttgtcaccaaaagagtaccagcatttagatatccttattctattgtcatattggacggggatgttagaacaaacagaaatgatttaaaaaaagtcaacaatgcagataatattttgatattaccaggaaataaatctcctgaaagactattggcggcctatttgtataacctctctgatgcagacccattatggtctaagattgcaaatggttacacaaaacaattctgcttccgagaatattccttggaacaaataaatgcaggaggtgagttggggcgccaaaatgcgaaaaactggcttaatagccagttaggatattggggacggaatggttgtaaaatctttaatccttttttaagttcaatttctatcgatgtacaagaatttaaagcaaattttgacaatatgattaaacggtatatccatgactaaatctctgatgtctacaatagaggagcttgaatactgaaagtattctttggcttcttggttgatgtataatcagaatactttccctttcattaatcaaataagatactattttttgtgcctttgctcaaacacactcagtgaaacagtatctgattatttgtgctataacaacagattcgctacattagcttactggatttttacgctcgtcgggacgggtggtcccgccccttggcgctggccgttccccgaccgatgagtttaaaagcgtaaaataatctgcgatatattttgattctccacggcttatcgaataacagttttcttatttcgatgttttatgaatttaagatacttgtaattacgtggaagaatttcttcgtttgactcccagaatttttcactcacatcgggctggatcggaacaaggtgcttgacagacttgagtttttgcatcggagtcttgccgttcagtgaggaatgtggtcgtttcttattgtagaactcctgccattccatagccatcacattcaaatcaagtgtcttgtccgacaaatctataagattccaaaactctgtcttatcggtctgctgagacctttcaactttgtcattcagatgcggagtccttggtttgattggtctgaatttgataaaatggtcatgcagttcatattggaagtcataattgaaaaattctgttccccaatcagtttgtatccgctgaacgggaaaaggaaaggtgttcagtatctctcctaaaaaatgaattgtactttccgcttttttattgggatatacacgaatggttctcaaacgggtacaatcatttatggccgtgaactggtatgctccgtttcgtactttcattacatccagctgaaccctttccccgggaatttctttactatatcggatatagtctgactttttacgccgtttcacaacagctttgacctgatgcttttttaacacacgccacaccgtcatggctgagagctttattttcttcctaaacagatggttggcaatccgttgtgctccccatcttctcgtctcacgcagattaaggataatggtttcaatttcaggtgttatcttcatattggcaagtcttgatgggcgtttagacttgtcggacaattccgacttaccttgttctttctcgcgatttatccaacggtataacgtggaacgggcaatcccgcaccgaagggcagtttttgtcacagaacccgtttcggcgtatagctcaagccatttttggcgcatccgtattttccgtatatcttctttcatgctacgaaaatacggattaagatttgcctacgaaaagaaaaagtgtagcgtatctattgatactttacatattattcgatgtatcaggcagtgaaggaacagcatcaacatttgattgaaatcacttgcacaaaatctaaactcgatacggaatgagatgtttctcaatggatgttatagatccattttaccatataaaacttccagctcagcagccatgaaacaatcgtgatttcaataactcatttgagcaacttccttatctaccttaaaaagatgtagtccaagaagtgtgagataaatacataagttccctttctgtaactgacattatatctcagttttcgggaaagacttttttcaatcgggtctgtcatcagcctgacacagttcagatgacaaacccgatttttgctttggctttatgaaataaaagagtcacagaattaaacatttaaaattggtcaaaatagcgtaggaaatatacgagaaaacattccatagattgaaaccccaaccattttatctaacataattgattttgatccttcaatcatacactgttgttcatgttgtgagtattcgctttctaccatcatcttaatgatagccttttctactgcattgttaacaagttttataagattattctgctctttttcggtatggaaattgtaataaatcataacatattgccattcgaccatttcccacatagtttcgccaccaagagcataaaactttgcatcattatcattataatctgctttgttatttttacatacagattgtgccaatagtcctgcaattctactggtaactgcaatacgagtagcattttggcttagtcccagttgggttggtattaatgcatcaatctttgcgaatgcattgtaaattgtcataaaatcttcatcgttaaacttctcatagtcttctcggtcgatttctagaatgtttaatatggtacgtatgtaagaaattgcagaagcagtgtctagtgtcattctgtttttcaacaatgctgccaacgtgattttctttaacggatatggaagtttttcctgctcttcttctttttgttcttctttcacagctcgtttgacaggcagaccaagaacagggcgaacagttctaccatagaatcgcgtatcatcaaccacgacaatagtatctgttccgtctttgaaccttaggttgtatgcagaataattgctttcatctcttgttgctgtccaatatctccctaattcattaacgccagctattctatacgaacttgctgatcctgatgcaggaagaaagatgtaattgttattggagccaataaccttccatcctaattgaccattttggcttgtccacttccattcacattcttctacgagttctttcatgtcctctttggtcggaatcctccattctccaccaagcctagattttgcaacatcatcctgagaatccagaacattttttccgtcagcttcggtgtatttgaaaattgaattgtatgaacctcgacacaatttataggtctcccatccgtatgcatccttgggctctttttctccccatgcaaaaaaatcaccaatttcggaaggtgacgatgcgccaatattacaagttgcccataggattccagacgataatcccaaatcaattctttcattctgagcattatttgattgggatataaacggttgtggcttggattcaccaccattgactttgtgtacactcttataatatccctttaagaaacttgcgaggtctgggtctattgtaacgttcagtttgtatccctggttcttgccaaatgaagcatgtttttcggtatacaattcttcaccgtattttaccatcagcggaaacactttatcagcaaaagtataatctcctgatggaactttgtctactagcccttttgtcaggaaatcaagttcaaattgtactttatcactttcccgaagaaagatataagaagcgagatttatagcttctgcctccaacttctcggatgtcaacgtacctgagcatttcttcaaatgctcgacactttcttttactacttgctcaatcggtgaaagtgtcttcaccactgcattctcattgtttgatttgttaaacagaaaatcaaaaaacttcatagcttatatttgttaaagtttaatatattatcgcgaaatcgattgaaattattgttgtactcttgctcaataagtataaaaattctatctgtatcagattctgtaaggacatcttctcctctatttaattctttccaatattcataagcattcattattgcatttttatgtttcctttctaccaactgttcatatgtttcatctgtcatgtcaacataacctccagtatcattaggccataaagaggcattacgataatatgtgagtgacttcatatagtagttgcttttcgtaatcattgaaacgtctgtcgctgtttgattacagaaatgtgcatagtacaaatctgatatatataggaaatcaggattttgtcctaaaaatgggagaaaggtgtatgctaatggcatctttactaaggccgctcgattaacatacgcagactgttctaataaatcatcctttgttatacaagccattcttgacaaataaagataattgtacttgaatatctttcttgacaagtcaatatcatcttgacacataagtctcagccatcgaaatgtattagcggctccagttaccgcaagttcgctattccagtgcttattgggaaactcagtcaagaggttgacgcttctgtgcaaataactgaatgactcttttatcttctggctatatatcaaaactccagctatgtctgctaaaatataaggatgtgcgataccgccgtattcaataattaaccagtcatagtcaataggcgaaatatgacggaagggaagaacttctgtctttgtcctatatggcgatttcaaatattcaacattctttatgtctttcgatgcaagtctttgttgattaacaatgtactcaaatacgttagattcatcaagacaaaggcttctgtcaagagaggtaatttctgcgagaggggctttcatactttcatgatgaaaaagcatccctaactcttgtaatagtccaacaatcattggattcttgacttcttccgtatagaactcatacaaagctgggaaaagccaatcaccgtttgcctcagtaaaacaactggcatgctcaaaagaaaatttagcaaaagattcacgatcttctacctggatcttcatcaatatgtttttgacttcttctgttatatccattgtcatgttgtcatttctgattgtaatgttttataaacaaatagatgtcggaaaacgactctatattggaatatacttcaatagtatatattgtaaaacctacttggattgattttctttttcccttttctccctaactttttccaatcccggcatctttttagccaaagcactttctccagcagggaaatagaggggaaagacttgaaataagaaacttacaatattattccgcttcttacccatgttgaaaaaggcagaacaaacaaaatacataagatattgttgactacatgtatctgtttgctgaatagttattgagggagtgattatcaaaccgtgttctgcgaatgcgcaagcactggcaagaatagctttctgctcttcctctgtgaacatcttgattttatctgctaaccattcaagttctctttgctgaagtgcttgttgcttttcattctgatgttccaataggattgctacattttcttgttgctttttggtcaaggcattttccaatgcttgattctttcgtttaaggacattgaatttcagtaatgcggcaatgtacatacagaaataacctactgcaatatcgaatatcagaacaagcagataattgctgtttgaattttgggtattcttagccatacactcactgataggaataacggcaaatagcatgatgatggctattgcataaagcactctgtatcgcattttgtggcttacttgcggcaaggaagcaaacaaaaaggcgataatcaaaacagcaattattgcacaaagtggaatgaaagatgttcccataggtttattgctcggtttgaggattaattacaatgcgccaatagccaccatggtctgctccttcacgagacaagattcccatagaacgaagctttgaaattgcagacattgaagggtcggaaatgacgaaatcaataatcttttgtgcggttttcccaatgcttttagatttgtttttcgaatctccgaactttttctccaaacctttttgcattatctccgaacttttgcagtttacaccgaacttttcgaccgaactttctttgtttacagggtacttttcgagggtactatttaccctgttggctacttcttcaacaggtattcttccgttttcgttccagttcagattatagaatgtggtgtagaaagaggtcgcttccgtttgatattgcggttcttttccttgcaggaaattaggcagcttctccgtaagttcccgcattttgcgtaagccggaaccacgtttctccatatagtccaactgtgtgaacacgtccgcaatgacgggattacggcgcatagaaggcactttgaatatgtcacggtcttgaatttgtgtaccgtcaagcatagcaccgggtgataccagttctacgcggtcatcataaatgtctatatgtacttcaccacccatcacggtataatctctatggataaggtggtttaccagtccttcaaagatggcacggtcggaatagtcgggaagatttaggcgataattgggcatctttacccatccgctcatagtgtagttcttgatgaagtccatgccatatttcaatagcaatacaaggttagcccgatgctctacggaactgatagcatcatccttataaagtccagtccaacgggtacagaaaatacgcgattgaaataccgtgcagttatccacaaacagtaatccggcattggtcagtttaccttcaggagtaaccagaccgaatgattccagatacttgtcattccattcttgatgggtttgctcgcggaatgtattggccaggatgatgaaagagtgcttgctggcatccacttgggtaggaagagaatcccatgtcatgtgcgtgtctttcaataccaacgaaagaagttgttgcgaattacactctacgctttcattacccactcgtacatatgcggtacgtgtcccgtcttgatagtaataataaggtgtcagcgttcctgcctttacttttacttcaagtagggtatgtccttcgtgttcaatcggaataagttgtatttccggcacagggtcaagtcttgccttgatggtttcgctgataaagtcggcatcggcttgtggattatttaaacctacaatcactctgtcgtcgttcactccatagaacaaactgccaccatccgtattggcaaaagccgatatggatttaagccatgactttactttcttacgttccaacatttccttgaaatcataagttgaacattccgccatcaatgtattgttatgtatttgcattattcccttattattcgtataatattttaattcttatcacaaaggtaatgatattgtgataatttcaaacgttttagcttacaaagaaagcatcaagtcagccaaaagaacagctgtttccggttcattcttttgtgcatctttaggtttccatgccaccacgaaccgtacagatgcggatttcaccttgtaacctctttgttcccattcggataatgtatcctgcatttttgatgataacttagctatgggtttatcagtcaatgaactatacaaaaagaaattactgtgagtcaaggagtctcctcctctcaatgccaagatttcttgttttcgttctttgaagaatcccaaattgacatctttgtgagagagttgcagtacaatttcttcaggcatgtcatattgtcgctgatccatgagatatcggtctgcactcaaatgattgaaacaatcaccgtttgtatgtatgaacagtctgtttttcgcacgggttattcctacgtaatatcgacgcatcagatgggcatcctttacataattgtcggatatgaacatatacacatcgtcaaactctctgcctttggccttgtgaatagttgataccacaacgtcggctcctgatacgtcgcagaagtcttccaccgacgactcaaatacaaattctttgaagtcactgaaatatttagtcttgttggtttgttcaaactgttccacacaacgtttcacatacatcaagcttagactcctgtcataagtagagaaggtgttatgcttggcttcttcccacagctcttccgtgattaacggtgtttttatccgcttgtttatatacctcaggaaatatctcatttcagccatattccaaaaacgtaggccgtccattgattgtatcagtttactgtttatgccatgtttccgcaaaagagccatcaggataacggcctcttcatttgtttgggtcagtacacaagaagttcctttatccctatgttgaagcaagttttcgacgagtggctgatacatatattccgattgatagcgtatcacttcaacccaacccttttcttttctcatggagataattggtatactttttatccttttatgtatgtttttcaagaatccgttggcaaaatctaccggctggcgcgcactgcggtaattttcggtcatttcgacaaacgtgcttccactttcttgtgccagtcggtacatataaccggaatcggaaccgcggaattcatagatgttctggtcatcgtctcccactgctatcacacgcatctcctcattattagtcattaaagcctttacaagcgcatgctcttcagctcccatatcctgagcctcatctatgactaacaccgtcttgccaatcttattgggttccacttctccttgacatatcatctcggctgcatttgaaacgacatttcttgattcttcaagatttcctatccgtcccaataggtcgaaacaataggagtggaatgtttttatttcgacaaagtgggcggcgttgcctatcaactccatgagcctttttttgaattccgtagcggctgcccttgaaaaggtcagcatcaggagctgttcgtgtttcacatcttcaagtagcagaagtgaggccagtttgtggaccaatacacgtgtctttccactacctgggccggctgcgactacaatgcaacgtgaacccttgtcggaaataatatccatttgccgtttggataattgtccgaacaattgtttgtacttctgtggtgtcaagttacgttgtatctcgtttgctctgtctcctttgaaatattttatgacaaactttctgtagtccatttggaaatagtcctgaacatattgcaaggccgcatgataatctcttaccatcagattggcatattcgcctacaatatgcacttgctggattttcaacttgtagaattcgttgagcatccgatagtcgtcttgcttgtatctcgacttgttgtcctttattctttggatattcatggcattataaagtaccaaaaatccgccttcaagttttagtgaaccgattttcgacaaatacagaagtgcttcttccacgtcttctaattgaatgtcatcaagtccgccaaaaagggattgggaatttgattttattcggttcagaagctctactacggagaactggatggctttgtcgagtgcattctttttttctgcatcaaaagctaatttgtatagccattccacggcaaagcgacttatttccaatcgtttctcaaatcgcctgatggtggattctaggtctgcctgacgacttatctccatgttacgagccgcatcttcttttttacgcgtatatcccttgacggtgaggaaatagagtagtgtccggatatctttttctttggatgtattgatgccatcgttcactgcattttcattcagttgcttgcatgatattcgtaaagctccgtcgggaatatgattaaggatgtattgttcaagttttgcaaagcgttcgaggagaatttgtgactttcgttccgaatcacctgcatcctgcaaataggcagatatatctttactgtctgccaatataccttcctgtcgcatgcgctccactacagatataacatctcttttgcttagtcccaaaatgtctgccagataatcgattcgtgattctgcttccgaatcttgagccttggcgatatgtttttgagaaatcaatgacttgatgatacggactgccttttctatttcatcgctgccaaaaagtagtgatgctgctatgcgttctcttgcttcgtccatattctttaccattattcccgtggcatatacatgaggtacattgtttcctcttaccaagtatccgctttgttccaaagctgctaatgctgtccgtacacgggtctcaatgtcagataccgaatcatcccatcctgcttgccgggcaatttccaacgcagaacagttgactttcatacggtgtttggtaaggtctttgacggctttccatacctgttgtatttcactaatgctaagtttcgtttggtttagcaatataaaatgcttgtccaaatcattgtcactgtaaagcacataacaacgtgcgctaagaccaggatcacgacctgccctgccagcttcctgtacataattctccagcgaatcggaaatatcataatgcactacaagaccgacatctttcttatcgactcccataccaaatgcagacgtggccacgatgatgtgtgcctgatcgttcataaaagcatcttggttggcaattttttcatcggcttccattttcccattgaaagggagtgccttgtaaccgtcacgagtcagttttgcagccagttcctttgttcgtttggtgcgtgacacgtaaacaattgtcggacaatcggcttctgctacaagttctctcagttttaaatatttgtcattgtcattctctacatgtatgacggaatagtgtagatttgttcttgaggctgttgatgcgaataattccaagttcaaatccaaagtctgcttgaaatagtcacagatgtcttggattactttctgttttgccgtggccgtgaaacaggatacaggtatcggggttttgcattttttcttttgctggtatttttggatgaatttgccaatgtagagatagtcaactctgaaatcctgcccccatgaagaaaagcagtgcgcttcgtctatcacaaaccttacaacgtggcgcgccatcaatattttctcgattgtttttgaacggagcatttcgggagagatatacaacaacgaggcttctccgtcttgtactctttgtatggatagcgatcttgtgatggggtctaacatcccatttatggttacggcatccgtgatgcctctgtcggcaaggttgtctacctggtctttcatcaaggactgcaagggggagatgacaaccgtaagcccgtgcacggagtggcccgccatgagtgcaggcagttggaaggtaagtgatttaccaccgccggtaggaaatattgccagcagcgatttcccttttaccgcagcttgggcagcacgttcttgcagtggctcgctttcgtatgtccggaagcgctcatatccgaaaaatgtttttaggttatggagcacatccaattgcgtatggcagtagtcgcagctttctttgcaagtagtgtgtcgcaggagttttatgataaattccacttccggataattataaagtatccatccgggagtgatggagcggtaatcggtggtgtcaatcagagccaatgcgtatgccaatccgcatggatattggttgatgagcatgtcaagatcggcatgttggcaaatctttccggcataaagttctttaataagttcaggtattcctttatggatatactccgcacttaccatactgagaaatccttcaaattccttcttgcccttcagcagcgatgcaaatagtatacgcttttctttcggtagtgaatgccagcatgctatttcatccaacaataagtcttttgctttcttgcaatcgttcaccggattgttcatttgttcgctcatcagtttgtcatctttcacaagcctgtggtaagggtgttcagggaacagtaaaggcgaaacataaagtgtatcaactaaaatccagcggcatattttgtccgtaaacaggtatttagcatcatggtgaacgatattgcgtccgcagatgtagtctacatcgtttaagaaaatgaatagttcttcttttgaggttttatgaaatgtcgtgttatcatgcttgagggctcctatatcatggattctatggtctttcaagcctatttcaacatctactatggcataattgtgggcactacatggtacagaggtggttttattgccgatgatattgtttctatcctcggttttcttgattcctatgagtttgctccatattgacatatctcaatataataaatagttttacaacttgaatttgttatgtatctgcatcgttttcttattgttgtttgggtataacatcccaatatcatacacaaaggtaaggataaaaccgaagaatctgttaaaaacatcgctttcttttgatttttatgcgtttacatctcgttatttatgaataaaaatcgtacttttatgaacaagagcgtgtgttgcttatgaatgcttattttcgggtttgtgttatatttgcaacacgtgtacgcaagtcgctgatagatatatcacgttgattttgaggaagtcaaataagaatttgctaaacgcttaatatatagaaaaagagctgaagatcattgactttcagctctttttctatttgagagatatatgcttgttatgatgtacttactgattaggaaggttagaagaatagatgttttttcttaaagcgatttatataaatatttatgactaaaaatagatataaaacagcgtttgggaatcaagtgtttctaaacgctgttttatatggctggaatatgttttattatataaataaagaaacaataaaataaacaccggctgctaaaagtccgctgaccggaattgtaagaatccaagccgtcatcaggcttttggtaactccccaacgaacagcagaaaggcgttttgttgcgcctactccgatgattgcccctgtgatagtatgtgtcgtacttacaggaattttcaacatttccgtgatgtagagagtgaaagcacctgctgtttcggcaatcactccttccagtggagttactttggtgattctggttcccattgtttttactatcttccaacctccggacatggttccgagtgaaatggccgtaaaacaggagaaggcaacccagtcgggcagatcattgatactatttatgcccatccccaatcccatggaatgtgcggctatcatggcggcagctatgatacccattactttctgagagtcattcagaccatgtccgacactgaaaagggcggaggatacaagttgtaatctcttgaaccattgctctgcggtatgaggatgagctcgccggcagatataaagtacgaacaaagtgaatccgaatgcaatgaccatgccaataaaaggagccaaaaaaataaatgctgcaatttttaggatgatattaagttgaatagcttcaaatccgtttgccatgatagctgctcctgcaaatcctccgataagggtatgagaagaagaggaggggatacctttccaccaagtaatcagattccaagtgatagcggcaataactcctgctaatataatcggtaaagtaatatattgctctactacggttttggatacagtgttggcaattccgaatccgcctattatatatttagcgataaagaaagcaacgaaattaaagaaggcagcccataatacagcttggaagggggtaagaactctcgtagatacgatagtggcaatggagtttgcagcatcgtgaaagccgttgatatagtcgaatatcagagctaggataatgatagtcactaataattccatgtgttcaggcttcttttatgcgtactttacaatcaggcttttcagaattttacctacatgctctgcagcatcggttgtcttttccagttcgtgcatgatttctttaatcttgataagttcgatacaatctttttcttcttcaaagagtttggtgatgaagaactcatatacatcatccgcttggttttcgatttcatgcagtttggagcaatattctcggaggagtgtcggctttttgcggaatgtttcgagttcatccatagctttacaaatatatatagcttcttcttggatcaaacggctcagttcttttccgctttcagaaataggacgaggattataaatggaaatccttttggcacaactgtttattccgtcgatgacatcatccatacaagaagctaagtcatgaatatcttcacggtcaaagggagtgatgaatgtagttcctaattcatcaaaaatcagatgtgtcagtctgtctccttcccgttcgaggtctttgatctttttgtagtactccgagcgttctgtcggttggtcatgttgcagactttctactaaagcaacagatgaggcagaaagtacttctgataattgtttcagtaacgggaaaaacttcggttcctttggggtaaaccgactaaaaaaagaatttttcataagtgtaaaaactttaaattgttttttctactttatttatattagtaacaaatgaatacagactatggtttgggcagtttaaaatttcaacttggcgcgtatgacctcaattacagcaggcaatatggatatgaatataatggctacaatgagtagttttaggttttcctgcacaaacgggagatcgccgaagaaatatcctgcataacagaatatagttacccagacagctccaccaaccaaattatataccataaaatagtagtaattcattttccccattcctgcaacgaagggggcaaatgtacgtactatggggataaagcgtgccaggataatggttttgccaccatacttcttataaaattcgtgcgttttctccaagtgactttgcttgaatatcttggatttaggattgttgaatagccttcgaccaaagaaatgcccaatcatataattgcatgaatcacctaatatggcagcagcaaataatatgataacgagtatgtgtatgctgataggcatatcgggtaacgcagagatcgctccggcaacgaaaagtaaagagtcacccgggaggaaaggagtgactactaatccggtttcacagaagattatgatgaataagatagcataggtccatgcatgataatcacgcacaatcatgaccatatattggtcaatatggagtataaaattgagtaaaaaatccattttatatactttgattgttattaaaaggaaaagataggaacaacaaataaggcatagaaaatatgaattttctatgtctataaaaggtataaaatggctaaatgagtatatgacctaatgtatagatgtgatatctatcggaatatttgataaaattagtatagaatgagaaacctgtccattgattcttaggaagttgaatctttaaagaacttaatatccggatagtaacggaatgaatattgaatctaagtaactttgaaggagagaaataacggaaggaggatggatttaagacaccgtcactgtcattgtagtcctgctttcctgtattttcttttgctttgacgagtttcttttctttccttagttgttttatcatagttttagtttcgggatgaaaagcattaacacaagtttgtatataggtactaccggtttctggccgatatgcttcttgcctttcgtcggaaatcaactggaatccccaacttagaaatatacctaataatatacagaatatgtacttcatcataacggccacaaatgtagaaactatttttatatgaaatacatattcacaagtataattaacaattatatctacggctgtcgggaactgttttctgcatttactctcataaatctcattggagtatatgttatcccgttagtacattgcttctcattcatcttttaaatcctaaatgaatggcgtatgtggatgaatggacagtcatttttctgtctgagcactcttattagtagaaatgtaatttattaacctttaaaaagcatcagtatgagaaatgtagaaaagcacttggttggataactgtttatttattattttgcaattttccttgttttcaaatggatattataaaagatatacccgaatttctgcttcctttaagattgatttgttttgccattcaatgagattgctgtaactttgcgtccggtttaaaaagattgtatgttatggaattacccaaagacccgatgatgctgtttagcgttatcaatatgaagttgcgcgattgctattcttcacttgacgaactttgtgaagatatggacgtaaataaggatgaattagtgaatcagttgaaagctgtcggttttgaatatagtgcggaacacaataagttctggtaacagacttcttatttacaatttatagataaagtattcgaattgcctctaaagcctctgtaaaggtcttggaggcaatttcttttccttgtattctacttctttttctcctctttcttgttaataaaagcaaaatacgaattcttgtatttaacttccacacccttctacgttctaactaataaagctcagatatagaattgatgataaacgagaataaaattcgtgaagcttgttcctcggatcgtgaacggggattcaagatgctgatgaactcttttcaggtaccgatatataattatatccgtaggctggtcgtgtctcacgaagatgcggaagatgtgcttcaggaggtctttatccggatattccgacatatcgatcaatttcgcgaagaaagttcactgtcaacctggatttaccggattgcgacgaatgaaagtttacgcttattgaatagtcgtaaagaggaaggagtcgtatcagcggaggatgtacaggaagaattgatgagcaaactgaaggcttctgattatatagattatgagaacgaactggcggtgaagtttcaagaagccattttgagtttgccggagaagcaacggcttgtattcaacttacgttattacgatgaacttgagtatgacgagattgcgcgggtgctggatagtaaggtggatacgctgaaagtgaattaccactatgcaaaagaaaaaataaaggaatatatactaaataggtagaacgatgaaaaaggattttgattttgacgatattggtaaacggaccccttacactacccccgacggattcttcgaggatgtgcaacgaaaggtaatggaacgtaccggggtgaaacaacagcggaagtctcacatgaagctgattatttctacggtagttgccatagcggcagtattaactggaattttattcgttccgtccttgcgtcaaatggatgaggtcaaatcgtcttcttcgaacacattggctgtcgacagaagtaatggtacggatccggtagacaaatggattaaagaattgtcggatgaggagttggaagagctcgtcagcttctctgaaaacgatatatttttgaattaagtaactcaatcaatgattaaaaatgtaaagattatgaagatgaaatttatttatgtagttttggctgctctcttgttgggaagccagatgaccctttcagctcaaaatagagataataaggagaagaaacaacgtcctacacaagagcagatgatgcagatgcagacgaatcagattgttaaaaccttgatgctggatgatgcgacagccgccaagtttacaccggtttacgagaaatatctgaaagaactgcgcgagtgccgcatgatgaaccataaaccaagagccgaaaaagctcaaggaacatcggctaccgataaaaaggatgctccgcgaccggtaatgactgacgaacagattgctaccatgttgagaaaccagtttgttcaaagccgtaagatgcttgatattcgtgagaagtattataatgaattcagcaagatactttctcaaaagcagattatgaaaatctatcagcaggaaaagagtaatatgaataaattcaggaaagagtttgaccgcagaaaaggtcagaaaccgggacagggacatcatcagggacaaagacctcgtgctccgcgccaaggataacaatagggattaggttatattataagtttctgttttactaaatcaacgcaacttgagcatagacaggcgtatttattcttttcagtaccgtttgatcagttgttatgtcctgttactgataagtttggctgtttatgcacagtccggcaaagagcgttttgtcgggcgtgttgttgatactgaaaccaatcagccggtaccgtttgctacggtccggcttttggctttaccggatagcatcttattagtgggaggagctacggatatacaaggtaaatttcagttagctgttactattccgaaaagcaagtctattctattgcatatctcttatatcggatatacctctgtttatcggactatatctgtttcagcaaataataagacacccactttgggtaatatatctttgagtccggagagtatttcattaaacgaaaccgttgttgtgggacaagcacctatggcggtgaccgaaggagatactaccgtctttaacgcttcggcttatcgtactcccgaaggctccatgctggaagaactggtgaaacaacttcccggtggagaaatagatgaggacggcaaactgctgattcatggaaaggaagtgaaaaagattttggtggacgggaaagaattcttttccgacgacccgaaagcagctcttaaaaatcttccggtagagatgatagaaaagctgaaagcatacgaacgccagtccgatcttgcccgtcttaccggtattgacgatggtgaagaagaaatgattctcgacctgtcggtcaagaagaatatgaaacgagggtggatggaaaattttatgggtggttatggaagtaaagaccgttatgaactggccaatactttaaaccgtttccgggataactcccaattgactgttatcgggaatctgaataacaccaacaaccaaggcttttctgaaatgcagggggagtctgccagttcttccggtaatcttcgtactcaaaaagggctgactacttcccgttctttgggagtgaatgccactcatgactggaagcgcgtcaaatttcggtcgaacattcaatatatgggcactgaccgtctggaggacagtcgtactacggtagacaattatcttcgtaaagacaaatctatcaccgaaagtaccggacacaatcgacagggaaacgataacttggtagcgaatgctttcttggagtggaaaatggattctgttacaacattgatttttcgccctcaataccgtacggctgccaatgatagaagtagtaacggttttcagcaagggtggggcaatgatgtgctactgaatgagcggggatcatcaggaacaactcatagctcatcctataatctgaccatgatgctgcaacttagtcggaaacttagcagaatgggaagaaatatagccttgaaagttgattatggtacaaatgaatcttccaccgacagaaccagcctttccactacccattacttcaaaaacaatgctaagaatgtaaagaatcaaaagattgaagatagaatggaggggtataactaccggttacaattagtttatgtagaacctttgccctggtttcattttcttcagttccgttacagttaccagtatcgggtgaacaactccgaccgttttgtctacaactggaacaaggaactggaagaatttgctcctgattatgacgaggacgcaagcaattgttttgagaatcagtatagtaatcacctgtttaatcttgcggtccgtacttctcgtaagaaatataattataatatcggtgctgactttgaacctcaaaagtctgtcagccgttctcttctggaaaaggcaactccggcagaagaaccgttgcgaaagtctgtttttaatatttctcctaccgtcaatttccgttataagttctccaaacgtacccgtttgcagattgtatatcggggaaaaagccgtcagccgaatatacgcgaccttcaaccggtgacggaccgcaccaacccgttgaatatccgtgtcggtaatccttcgctgaagccttcgtatacgaatactttcacattaaatttcaactcctataatgccaaacaccaacggaatatggttgcttccgtcttggcggagaataccattaatagtataaccaaccaagtgacctatgatagcgaatccggtgtgcgaactaccactcctcttaatctgaacggtaactggcgtgctatgggctctttttctctcaatactcctttcaagaatcgtagttggcgattccgtacatattcatatctgcaatacagaaaccagaacgggtatagcactataaataaagaagctcctgtaaaaagtacagtgaaacatctcacagcccgccaacgcttgcaattaacataccgcacgaagcaaatggaaatcagtgcccgtgcagaattgctgtacaacaattcccataataatgtgaaagagacacgtaccgaaacttacgattaccgctttggcacggaagtacaatattatttcccatgggggatagaactgttcagcgaccttacctgttttcaacgttccggctatggatatagtggcaatgcccgcgaaaacctgatgtggaattgtcagttgtcgaaagcctttctgaaacggaaacaactactgctccgtttcaaaatatatgatattcttcatcaggacgtttcgatgatacgtacgattactgccactgctattcgtgatactgattacaatgcgctgggttcctatttcatggtgcatgctattcttcgtttgaatatgatggggcgataattgagaattaaatttctatttatccgaaaaccacagcagggttttgattgttgttgtcgtacgtgaaaacaatgaaaaccttgccgaatgtttgattttgtcaataaattgaaggataagggccgttggcgaatctttaaactgaagttgattgacgcgcggctttactttgttagtatctttgtggggctgctgacggggcttgttgcagtgccctaccattatctattgcagtttttcttcaatcttcgtcacgatttctttgatgcccatttaaagtggtattggtatattcctcttttcctgctgatgtggggaattcttctatttgtttcctggctcgtaaaaaaaatgcctctcattacgggtggagggattccacagacacgtggagtcattaacggacgggttgattacaaacatccttttcgggaattgatggctaagtttgtaggtggaatactcgcattaagtaccggactgtctttaggacgtgaaggaccttccgtacagataggttcatatgtgggatacttggtatccaaatgggggcgggtgcttagcggcgaacggaagcagttattagctgccggtgcaggtgccggattagcggctgcttttgctgcgccattggcttcgtcgttgctggttatagaatccattgaacggttcgatgcgcctaaaacggctattactacgctgctggcaggagtggttgccggtggggtcgccagttggattttccctatgaatccttattttcatatagatgccattgtgccgggaatgacttttggggggcaggtgaaactgtttcttctattggccgccgtaatttccattttcggaaaactcttttctatcaccacacttcaggtcaaacgtatctatcctgccattaaacatccggaatacgtgaaaatgctgtacctgctctttattgcttttcttatctctatggcggagttcaatttgaccggtggaggagagcaattcttgctttcccaggccatgcatccggatacacatattctttggattgtcggtatgatgctattacatttggtttttagcatattttctttttcctcgggcttgccgggtggaaattttattcctacattggtgacaggaggacttctcggacaaatcgtagcattgattatggtgcgacagggacttattgcatacgagaatatcagttatatcatgttgatttgtatgtccgcttttcttgtggcagtagttcgcactccattaacggctatcgtgctgataaccgagataacgggacatttagaagtattctatccttcgatcgtagttgggggattaacttattatttcactgaaatgcttcaaataaaacctctcaatgtgactttatacgaagacatgattcattcacctgcattcaaagaagaagcacgctacacattatcggttgaggtcatgagcggttcttatctggacggaaagattgtggatgagcttcgtctgccggaacgttgtattattattaatgttcatcgcgaccggaaggactggactcctaaagggcagaaactaatgcccggcgatcaggtacaaatcgaaatggattcacaggatatagaaaaactgtatgaacctttagtcagtatggcgaatatttattagctgtccgttatatataaatagctgatagatcctgtctgtcagctatttttgtatatcaatgtcttttgttatctgtcttttactcaacacttcttaaccaggctatttcctctgcccacttactttcatcaggagtttcgagtaccaaaggtatattatcaaatcttgaatcttgcattaatctttcaaagaatgcttttccaattagtccctcgccgatactgtcgtgacggtcgacgtgggtacccagtgctttcttcgaatcattcaagtgcataccacgcagataattgaatcctacttccttgtcgaattcttcaaatactttatcgtaatcgttcacaatatcgtaacctgctgtatatgtatggcaagtatcaaggcaaacacctacccggcttttatcatctacccggtcaataatatattttaattgccaaaactcgcttcccagattactgccttgtccggcagtattttcaataacggctgttactccttttgtcttttccagagtgatattaatgctttctgcaataagtgacaggcaatcttctgttgctattttattaagagagctgccggggtgaaaattcagaagtctcaagcccagttgctcgcagcgttgcatttcgtccaagaaagcggcacggcttttattcagtccttcttcctcaggatgccctaaattaataagataactatcgtgaggtaggatatactcaggctgaaaaccgtacttatcacaattctctttgaaaagccggatactttcttcgctcaatggtttgctaatccattggcgttgatttttagtgaacagtgcaaaagcatttgctcctatttcatgcgcatttatgggggcgaattctacgccgccggatgcacttacgtgtgctccgatatatttcatattttattcttttttgattataatctgcaaatataacatttttagaggaacggatgtttgaatgaacaattaagattgttcttcttcaaaagcaagccatgagtttcttgaggtttccttagttagaaactccagtttccagccttggaaccggagttcccacgtttggaatatcttctcgttcttatgttaaatgtcttttttcattattagtcgattttcgttatcgatgcgttgataggatatttcattcatgatgctgcgaatcaggaaaatgccaagcccaccgataggacgttcctcaatcggaagtgtgatatctacttcctctacttgcgtgggatcgaaagaagctcctttatctgtgagaaggaaaatcagttgtttttcggttgaagtaactttcagtaagataatatgttgctctttgggagggtaagcgtacatgataatattggctacagcttcttccagtgccaaattgatattcataaccgtttctgccggcagggaaagttcctcgcccagttcttctataaaactggctaaaactactatctcgttcaaattgtttgagattctaatttctttttccatactgataataacttaactgtttgctgttccgggttcatattgaattagtaagatggtgaggtcatcacttgcttcggcttctttgacatggcttgcaatggagtctacaacaacgttgactgtagtacgcacatccgacgaggcattatctgataacatttccaataacttttcttctccatatagttctttatttatattttcagcttctgtcactccgtcggtataaaggaacaatttgctttctttttccaatacaacttcttcatcactgtatttaaaatcttcgacgactcctacaaatatttgagttttgaattccaaatatgaaacctgtccatcaggataaatgagtatgggaggattgtgaccggcattgcaaagtttcagtatgcctgtttccagatcgagtatgccgacaatgagggtgacaaacatattggattcattattgtcggaaatagaattgttcatttccgtaactattttggcaggtgaaagtacatgctgggataacgtccggaataagctacgggtgatagccataaatagtgaggcgggtactccctttcccgatacatccccaatcaggaaatagagatgattgccgtccatatagaaatcataaaggtcgccacccacctctttggcgggatgcagtatggcatgcaaatccacatcattacgatccggataaggaggaaatattttagggagcatgcccatttgtatttcccgtgctatggaaagctcgctttcaatacgttctttgcttgcagtagtctctttcagttcattcacgtaagtcgacaatgatttttgcatgtagactaatgaatcatataagtctttgatttcatcattcgagcggactaggggtagtgtcacgtcaaaccgccctgtggcaatttcacgagcggattccgagaatttctctaatggacggactaaacgccggataatactgtatacaataagtagtaatatcagtataccgaccagaaaagtataaatgatttttcgggaagtactgtccagctcctgaagaataatacggctcggacataccgtgcatactgaccaaccgatttggggaatagtagtatagaatgcgtatgaatcatttccttggttgtcgaagcgtatagtacctgtatgaccggccagcatttcacgtcctatctgttcctgtgaatggttttctgtggcaaaggcttcggaaaatatggtctcattcattattttatcccggtctgcatgagtcagaaaacttccgttgcggctgattaagtaagtataactggagggatatggtttcaggagactgatcgtatcggtgaattgcgtcagggatatactggcgataaagacagcgaacagttcgccacggttgtcatacaaaggctttgagtaagtactcataatgatatttccgcctccgtcgtcataataaggttcactccagtaggcttgtttctgcattttagggataagataccagtccatacaaggataatcataattctgactgcctaatacctgataggttacatgatttgttttgttatcgagcgaagcataaggcataaaatacttgcctttttctttatagtagtttggggtgaaagctatgccgcttttgacaataagtggattattctttacgactgattcgatgataagatgcaatgaatccggcaggtttatgtttctttccaatacccatgtagattgattgatagttgtttctaccgacattagctggctgctgatttctgttgctatgttactcaataatccgtgagtacgttcaatggcgtaactcgttaccttttcatggttataattgtagaacaatgccatgatagtagcaaagacgatcaacgtgaatgagaaaacgtagatacttaaccgggttgcaaaagaatgggaaaatgtgtgtttcatgtcgtgaattggttattttacaaagtcttcgtaacgaatactttttttctttgagatgtctggtggcagtaaaatatcaattgccagatcgaaaccttcacgactcagccgataagggcgttgccctgttttgtctgtttgcaatcgcagtatttcttccagcattttacgctggtgatatcggttggttcctatattgtaatgatgtacctgctccattacaatgtcaagagtctcttccgggtgctcgttcgcccagttccagccacggatacaggctctgactagtttctgtatcgtttcgggatgcttttgataaaattcttcagtaacgtaaagtccatcttcgggcaagttatatccataatcggcaaaacgcatgatatgagtagaatctatctgcattccacattcggcaagttgtggaaactcgttataacttcccaccatacaaatatctactgcttttgatagaaatagattgataccactgttaaaccgtatccattctacttcaatttggtatttgttcgcgattcggtcgagtagttcctgagtaagatgattccatactgcaatttctctgtgttgtaatgacggaattccttttaatggtgagtggctgactagcatcaaactgttttcctgtgaagtttgcaggatatttacaattcgttttcctgcaaagtattccattaacgcttgtgatagattggtgataactgcctgcggatctccttctttaagatactggaatgagttttccgaatgagacggatgtttcacgtgtacatcaagtccttcttctttgtagaagcccattttctccgctacatagtaacctgcaaattgtgcctgtgccgtccatttggggataagtgtaacagactgtgcatgaactacgtttattaatgaaaatacagatagtagcaggatgcaggctatgatgcggattactttcatacagtatgagttagcgtactgtaaaaagtccggagcatccggtcatatcgaatattttacgtatttctggtttcatcgcctccaggacaagttgacctccatgttgcatgacactcttttgcagtgtaatcaggcttcgcaaaccggaactgctaatgtatgataagccttcgcaattcacaattatatttggagttttactagctaaaagaggttgtaatactgtattgaatgtattggcatttgctgtatccaaacgcccttcaatagtgagaatcgtcacttcttctatttggcatagattggttttcaaagtagcttcaggcttgaagtccatatctatattcttggtaagaattaattcgttatgattatctgtggaatgatattctactttgtccattgtacgccggatcaggaaaagtcccaggccttgtgtcagttgttggtcgagagattgtacattgtcagatgtttctttggcagtaggatcgaaggaaattccgtcgtctataatttgtgtaaccagcattccgggagcaacagatgttcgaaggatgatttcactttctttattggaagggtagccgtaacggataatattggtaaccgcttcttcaatagcgaggttgaggctcattgtgatacctgccggtaattgtaatgacattcctaattcttcgataaatagagcaattcttgcaacttcatccaactgattatcaatgataatttctttttccatgttttttaagtagcgtgtcatatttgtatggcttttgtttgattgaatgctgcgcaaaagtacggatttctgttaagaataggaaattaattcagatgaaatccttccgatattggcgaaaatctttaggaaaggacatcttttagccgataaatcattttttagcatgaaatcttatttggacaactttctttttcagagatatggtaatgaaaagtaaataagcccggcataagataccgggcttattttattgttcggatgttgaaatcagaagactatttagctaaatcgcctatctcatccaagttcttttgaatatcttcgtcggttaatgagtagttcaccaaatcacctgccagatatttgtcgtaagaagccatgtcaatcaacccatgcccggaaaggttgaacaggattactttttcttctcctgtttctttgcacttattggcttcgcgaacggctgctgcgatagcatggcaggactccggagcagggataataccttccatttgtgcaaacaggcaaccggcttcgaacgattccagttgctggatatctaccgcttccatgagattatctttgagtaattgtgaaacgatgacacctgcaccatgataacgaaggccgcctgcatggatatgagccggagcaaagttgtgtcctaatgtaaacatcgggagtaatggggtgtatccggcttcatcaccaaaatcatactggaacttgccgcgtgtcaatttcgggcaagaagcgggctcggcggcaacgaaacgggttttcttgccttccagtatgttatgacgcatgaaagggaaggaaataccaccaaagttggaaccgcctccgaaacatccgattactacatccgggtattcaccggccatttccatctgtttttccgcttccagaccgataattgtctgatgaagggtaacatgactaagtacggaaccaagtgtatatttgcagttaggagtcatttgagcaagttcgatagcttcggaaatagctgttccgagtgaaccctgataagtagggtgtgcagtcaggatatcttttccggcgcgggtagacatggacggagaaggagtaacctgtgctccgaaagtctgcatgatactacggcggtaaggcttctgttcgtagctgattttcacctgataaacggcagcttcgagtccgaaaactttggctgcataagaaagagcggccccccattgtccggcaccggtttcggtagtcacgttggtaacgccttcttctttacagtaataagcttgtgccaaagcggagttcaacttatgagagccgatagggcttacactttcatttttaaaataaatgtgtgccggagtaccgagcgctttttccagtccgtaagcacgaacaagcggagtactgcggtagtatttgtacatttcacggacttcttccgggatttcaatccatgcatcggtctggttaagttcctgatgacacagttctttagcgaaaataggatacaggtcttccgctttcagcggctgttttgttcccgggtgcaaaggaggcattggcttattgaccatgtcagcctgaatattgtaccagtagtgtgggatttcttcttccggcaggatataccgttttcttttgtcactcataatattgtggttttttagttttccgctgccaaatgtagacaaaatttttaatattcggatgtttttgtcaacaaagaatcggattcgattgttattttagttaagtttgcacggcattatataaaaaatgcgatatgaagatttatcataagtttttgttgtatcagaacaaactactgaaaccttatgtacgtatcttattgggtttagtagaagcacttacttatctggcgtctttgttgttgatcgtcggagtgatttacgaacatggctttccgctatcggttgatgaagtggcgaaaattcaggtcctgtataaggctgtatggattatttttctggttgatgtgactcttcatatctcacttgaatatagaagtacaaagaaacaataccggcggttggcctggattttgagcggtttgctgtatctgactttgataccggtcattttccatcgtccggaagaagaaggggcgatcctgcaattttgggagtttctggacgggaagttttatcatcttgtcttattactaattttttcttttctgaatttgtccaacggactggtccgtttgttggggcgtcgcactaatccttctctgatattggcagtcagctttttggctatcattctgattggtacggggttattgatgttgccacgatgcacggtgaatggcattacctgggtggattcattgtttacggctaccagtgcggtatgtgtgacggggctggtgcccgttgacgtatcgactacatttactaccggcggacttgttgttatcatcctgctgatccaggtaggaggattaggtgtaatgacattgaccagtttcttcgctatgttctttatgggaaatacttctctttacaatcagttagtggtacgtgatatggttagctccaattcgcttggctccttattgtccacgttattatatatcttgggatttacattggtgattgaaggtatcggcatgatttctatctggttcagcatccacggaacacttggaatgactttggaaggcgaactggcttttgctgctttccattctatttccgctttttgtaatgcaggtttctctacactttccggtaatttgggaaactctatggtaatgaccaaccataactggctgtttatttccgtctcttttctgattattctgggaggtatcggttttcctattctggttaatttcaaagatattgtactgtatcatttgcgtcatttctggaagtttgtacgtacgcgcaagttagaaaggcataaggtgtcgcatttgtataatctgaatacgaggattgtgttgattatgacatttctgcttttggtaaccggcacattggcgattgccgcttttgagtggaatgcttcgtttgccggtatgcctgttgcagataagtggacgcaggctttcttcaatgctacttgtccgaggacggctggtttcagcagtgttgatttagcttctttgagtgtacagactttgttggtctatttagtgctgatgtggattggtggtggtgctcaatctactgccggtggggtgaaagtgaatgcttttgcagtggttgtcctgaatcttgtggccgtgttgcgtggctcggaacgggtggaggtattcggaagggaactttctcatgattctatccgtcgttctaatgcgacagtggttatgtcgttgggcgtactgtttctttttatctttatattaagtatactggaaccgcaagcctctctaatggcattgactttcgaatgtgtgtcggcgcttagtacggtaggttctagtctgaatctgacacctaatttatgtgatgcaagtaaattgttagtggcgttgttgatgtttatcgggcgtgtgggcttgataacgttaatgctgggaattatcaaacagaaaaagaatacaaaataccgttatccgagtgataacattatcataaactaaagatatgaagtacattattatcggtttaggaaactacggtcgtgtgttggctgaagagttatcggcactgggacacgagattattggtgcggatattagtgaaagccgcgtagatagtataaaagataaggttgctactgcatttgtgattgatgcaacggatgaacaggctttgtccgtgcttcctctgaacagtgtcgatatagtgattgtcgccataggtgagaatttcggcgcatcggtgcgtgtggttgctttgctgaaacaaaagaaggttgctcatatctatgcccgtgccattgatatggtgcataaagctgtgcttgaagcattcagcttggagaagatattgacaccggaagaagatgcggcccgcagtctggtgcaactgctggattttggaacaagcgtggaagctttccgtgtcgattcggaatattatgtcgtcaagtttacagtcccgaaaaagtttgtaggatactttgtcaatgagttgaatctggacgaagaatttcacttaaaactaatcggattgaagcgggcggataaagtaactaattgtctgggtatttctttaatggagcttcatgtgaagaatgaacttccgggggacgagaaagtagaagaaggggatgaattggtgtgctacggtaaatatcgtgacttccaatccttttggaaagctatttgattattattcatctttaaatataaaaaaatgcgattaaaaagactactattaccggctattttgttgctggtttctgtttttgtgaaggcacaaaagagtaatgaatttacagtgttgcaatggaatgtatggcaggaaggtaccatgataccaggcggatatgatgctattatcaatgagatagtccgtctgaagcctgactttgtgactttcagtgaggtgaggaattacaataaaacgaatttcacggcacgtgtgtgcgcttcacttcaggaaaaggggctgaagtattattctttttatacttatgataccggtttactaagcaagcatcctatcacggactctttgacggtttttccggaaaagaatgaccatggaagtatttatcgtctaacaagttccgtgaacggaaagaaggtagcggtttatactgcccacctggattatctggactgtgcatattataacgcccgtggctatgacggctctacctggaaagaaattccactgccggcgtcagtagatgaaattatgaaagtcaatgtagcctctcagcgggatgatgcgattcgtatgtttatcgcccaggctgagaaagaccttgcaaacggctatcgggtgatcgtgggaggggacttcaacgaaccttcccatcgcgattggattgagaaaaataagaacttgtacgaccacaacggctttgttgtaccctggacagttaccactttgttggaagaagctggctttattgacagctaccgtaagatttatcccaatcctctgacgcatccgggatttacctatccttcggataacctggcaaaaactccggaaaagataacatgggctcctaaagcggacgaacgggatcgtattgattttatcttctataaaggaaaaggattgaaagcaaagaaagccgttttgtttggtccgaaagaatctattgtccgctctcaacgtgtaaaggaaacatcaaaagatgaattcatagtaccgcttgatgtgtggccgacagaccataagggattgctagtgacatttatctgtaaataatcgactttaatattttaggcacagattacacggttttagaactatgattgcataaagcaacagggtaatctgtgcctaaataatagtatagggtaggatggatttctctatttcttataattctacccttttattttgcctgaagatggactgttccggttttcactccacttgccttggcagtcagtacaagatctccggcaatctctcctgcctgtacaatcgctgtcaacattccatggaaagcgtgcatcttcggaaggtggaattgttccagattggtagggtcgccgttagcaacagcccggaacttaccggctccttttacggagaagtgaatcaggcggctatcggtaggacagaggttaccatctttgtctaccactttcacagtgacgtaggcgaggtcttttccatcggctgtcagttcgttgcggttgctgaccagttcgatatgatgaggctttccggcagtgcgtactgtcttttccgctactgcttttccgtccttattgtaggctacaacttttacttcgcccggttcgtatacggcatccatccacattaagcggtaacggctctttaaagaactgttattcttgctttgtttaccgtagctttttccgttgataaacagttcggcagtaggatagttggtatatacgaataccggggtcacttcaccttcgcgtcccggccaagtccaatgaggaaggatatgtagcgtttctgcatttttgttccatacgctacggtagagataatagcggtccttagggatactggcaaggtcgataataccaaacatagaactatgattcggccatgaattgacatcatatggtgaaggttcgcccaaataatcgaatcctgtccatacgaattgtccgatagtccagtggttatcatcggctaaggcgaaatcttcatccgggatattcgaccacggacatgcttccacgtcatacgaagaacattggtggtcttcatatttggcacctttcttttcttctaccggaaatttgtagactccgcgtgaactgacagtggaagccgtctcgctaccaagaatcaagttctgcggaagctggtcgtaagattctttataacgctgtgtgcgataattaagtcccggaatgtcaatcatggctgcaaagccgttggcaagcacacaagacacttgatccataccgcaagtcacgggacgggtagggtcttcacggtggcagatatcctgcaagaatttggccactttataaccgacaggactgcattgagtaggtacttcattaccgatactccacatcactacacaaggattgttgcggtaattatgaagcatatttatcatatcgcgttctgcccattcgttgaaataacggtgataaccgttgtcgcatttggcaatatcccattcgtcaaacggttcaatcatcatcataaatcccatttcatcacataattcaacgagttccggagccggcatattatgcgatgtacggatagcatcacaacccatatccttcaaaagagtaagttgatggcggagtgccgctacattgatagctgctcccaacggacctaaatcatgatgattacatacaccctggaatttccggtgttctccgttcaggtagaaacctttatcggcgataaattcaatgctgcggataccgaagcgggtcgtataggtatctaccaacttattatttgcatagattttagaaaccgctttgtagagcgacgggttttccggcgaccagagttcaggtgcatttacgatgaagttctgttcaaacggctgtccgtgattgatacggccggtattttctttgcgggtaaccacctttccgtctggggaaagaatttccgtctccatgcggatttgtgttttttcaccggcattgtctatcctcgtttgcaggcgtacggctgcaaattctttactgacatgaggagtcgtaatctgtgttccccatacaggcacgtggattttatcagtaacaattaggtgtacattgcggtacaagcccgctcccggataccagcgtgaagattgcggacggttttccagccgtacggccagtgtattactctttccgtttttgttcaggaaaggagtgacattgcaatggaaagaattgtaaccgaagggccagaaacaagcctccttaccattcacataaacgcgggcttcactcatagcaccgtcaaagagcagagtcacttctttgtcggcgggagtatcaaaactagtacggtaccagccggaacctacataaggcagtccccctgtgcgtcctgttttcaaagacgccttttcctcaaaattttgtgtgatggccacattctgaagatcattgttcatatcgaaaggaccaaagatagcccagtcatgtggaaggacgactgattcccattgggtgtcattaaactccggctgactggcctctttgatatctcctttgctgaatttccagttcttttcgagcaatgtctcgctacgctgtgcttgcaggctgcaagcagctgccaacaaaagtgcagttgctaactgtttttggtgtttcatgttcatttatctcttaaaagcattaaatgaattggtgggtttgccactgtcatcgaacatccctttactataacctttccagttaccgtaacattgaggttcccaggtaaatactcccagacattggtctacttgtttggctttggtaacgaagtctgtatagaaggcttccgcttcttcgtaatcccaactaataccgatttcacacatcattaccggagtattgtatttggctattaacgctttcatattggcgatacaatcattattcatcgcttcccagtcgtccggtgtgtgtgcgtcttcggttgatatgtccggataaagtgacataccgatgatgtcccatttggcattgttttcgtgtaagtagccgaagatcctattgtacaggctggcattatttccttggtcaagatgaacaataactttggcttccggatagacttcttttacagcatcgtaacccgctgtgacaaatgatgcgaaattaacccttccttcttcacttgtagtttgtccggtagggaacaacattccttgatgtgtttcgttacccacttgtacccattccacgtcaatacctttctctttcaatgcactgagtacatctttcgtatggtcggcgatagcttgcttcaattgctctacggagtaatctgcccatgcttggggtttagcttgctgtgaaggatcagcccaacggtcgctgtaatgaaagtcaatcatgatacggtagcccaagttatgggctctccatgctttgagcaatacatctcctttgttacaccaacctctcacatcatcagtgtcattctccggatttacccatacacgcaggcgaatggcattcatacctaaatcacgcaatagggacatacattcctgttctttttcttcggcagtatagaacttatatccggaactttccatttccgttaaccagctgacatcggctcctctggcgaaacctgacatatcataagttacttcttccttttccgggaagaccggtgtgtcattgtcatcgctgcaagcggtgaaaaggcttccgccaagtagggcggaagctatgaatagaatctgtttaaatcgtttcataatgttctgttgattattgtttatccatagtaaatgttagggaagcaatgtcaagggtaattgcataagtaccggtttcagcaggaacaatacttccgcttccattactgtcggtcaagtatagtttctctttatttccctttaatgcccagttccataccaaaccgttttctgcattattaagcaggaagtagaaaccgtagttattgcccagattatcaatgacaacggtggctttccaaaccttgtttgtttcatcgtatgtcatcaaatctttgtttaaatcccaattgttaaactcaccacagacattgatttgggttatttctgttgttccccaagtcatgtcggccagactggctgtgacaatgaaagtacgacattcttcctggtggaaccagatattctgtccgccgtccgccagtttgtattcatcgttggagtcgcatccataccagataccggctgtttggtctacaatcttaaaattatcccaaccattagtcatttggtaaacaccttgataacttccgtgatgttcgccgctattgtcgtaaacagggtttaatgtagctaaccaaccctttccatccatgtttcctacaccctgcatttccagataagaaggataagtaggttcactacttccaccttccgtaacgctaacagtccattgttcgggattattaaggtcaataaccagcgtacattctcccgtagccggaacacttaccgttatatttccggctattgcagtctcacctgtactgaatgtcagttgtccggcagttccaccgaaagcaaatggggtatctttggcttttgtatcgtcaatggcattatcggaaccgctgacactggtattgttgtaaaacttacctgttccttgaagttgaatgttgatattcgtaccttccgtacccgtaaatacacctttccattggttatctgtacggttgtattgcatattgataccttctatgccgcttacattcagttcgggtatcagtaaggcgttccattgtttctgagcggtatttacattcacgaaataacatcccgactgaccggggaaccacatatcccatgttccttccgctgcgtctgttgtcaacaagaatggagttcctactccaccggattgggctgtatgccaggttgttccgtctgcttcctgtacgtaaatgccttcccaagccgctgccccgaagaatccgctatattgtccgtcagcatttgccgaatagaaatcctgaccggaatcttgaccgctacccttgttgataatgctggcgtaatgcatatcaataggataaggagtcactgtgactgccactgtattgctatatacaggagcgatgttgctgccattgcttcctgccagtcggaaataaagaggagcggcttcttcagccggtgcatttagtttgtaagcaatgatgttcagagcggcgactgtataacttttggatactccgttttccgtagattcgataatgctgcctgaaaaatcttcagaccgggatacttgtacggtagtttgaatgccgttggtcgcttgatatctcgggtcgctgatttgcaatgtctggtcgctccaggcaagggataatgcgtaaagcttggcagtagcttccgtcagtacaacggcattggtagaagcgattaagtcactctccaccgggctggagagatagaatttctctccgtctttctcacacgctcctaataaaaggagtgcggagagtaaagccaacagggtatttatttttttcatattgttgtatcgaataagcgtgattaatagttttcattgtataggttcgggttggcggttaactcggtagtcggtatcgggtaaatattgtaccggctgtttaccgctgttccttcttttactccgcctttccattgccataagtaaccattggtagtgaatactccgtagcggattaaatcggtacggcgatgtccttcccaataaagttcgcgggcgcgttcgtccaaaataaacgatagattgatttggcttgcgtttttattattgctgtcgtcaccgtatgctctttcttggatttggttgatataaccgacaacttccgttgctgttgttccgcttccacctcgtacaaaggcttctgctatcatcagatatacatctgccaggcggaacaaaggataatccgtgtttacgccaccgtctgcggtattggaagctgtttctcctgcatccgtcaggttcgtccatttctctacaaagtaaccgttactttggtcgtcaatcttatccaggttcagtgtttgcccatcagtgaaaaacatggcccgtttatcttcttctccggtaaacagggaggggatttctccgcgtacacggaacataccccaaccgcttttcactccgtaatcttccggcttctgcaaatccgaagtattactaaccgcaccacagacaatataagtggaagagccccacgaaacggtatgcgtagcgtctaccggcaaagtgaagatgatttcgttagcagtacgtttatcgttatcagcgttgaataacttgctgtaatcatcttccaatgaatacccttgcttgataacctctttacaagcactgatacattcggtatatttcggtgtattgatgtaaacttccgcgttcagatacagcttggccaataaggtataagcagctccccgggaagcccgtccgtaaggacagttggctctgtcgagcatatcgcttgtgatacttgtcagttccgattcaatatagctgaaaacttgtgcagccgtgtagcgtggtggcagatagccgacagtcgggtcgttctctgttacaaacgggatgttgcggaacaaatccattgcatgataatagaacaaggcacgcatgaaacgggcttcggcacggtaatggcgaatttcagtctgttcctgttccgtaaaccgggcaatgctctcatccgtagcattacgaagaaattcgttacataatgcaatgttgtaataaatacgatagtacatatccgatacccaagggtcattggcgtcccagctcaagtaagtcagaccggtaacgttatcacccgacagccaggtagaagctacttcatctgttccacattcttgtagattgaagaagcaacgcatataatcctgaccgctgttactgctcaaatccggatcaccgcccttttcctgaccggtggttaccatagcagcgtatattttccctaaaacggctttatagttatcggcacttgtgtagatcgtggaagatgtttcgtcttcatgcggatattggtccaaatcgcctatacaggaactcaacagcaatgcgctgcaaaaatagaaagctgtatataatatctttttcatgattcgcttgtttttaaaagtaattagaagttgaaacctacgttaagtgagaatgtacgtgggcgggggtagaaggaattatccactccgttggggacttccgggtctacaccactgtatttcgtgatacagaatacattctgaaccattgcactgacattcaagctgcatcctttacaaatctgcccgaagttatagttcaatgacagattatccattttcaggaaagaagcattctctacatagtaatcggacaagtattggcgggacttgaagccggttttcagataactacgcgacaggttgttcaactgataagagttgtagctcactgtttcccaggctccggcattcatagctatagcattgtaaacatagttaccgatattggcacgcaggctggtgctcaacgtccatttcttccagcgtagggaagtgctgaaaccgaggatatagtcaggagcgggagagtggtaacggtataaatcttccgtattgatttctccgtctccgttaaggtctacataagcgccttctacgggcttcccgattttttcgtcatagagctggtgatagacgtagaacatatagggggcatatccttcggtcaacgtctgtacctgatagctgtcaatataagggccgaccgaagtattagttgcggcagcaccggctacgagagacaggttctttactttcatcttttgccatgtcatattgaaactgatatcccagttccagtctttagtttgaacaggggttgcgtttatgctgaattcgataccctgactgtctacatttcctacgtttgtagtgatattacgatcgaaggtcgtcccggctgcggcgggaaccgtggcaatcaagtcctttgtttggcgggtgtagtagtcgaagctacctgtaatgcggtctttcaggaagccgaagtcgaatccgacgttccaggaagtagttgtttcccatttcaaatcgggcacataggaactgggacggtaggtatgaatgtatccgttacccatgctggcttccgcaccgttttggctttgagtgtagataggcaggtaattataattgccgataccgtcctgctgtccggtcacaccatagctggcacggagcttcaagttactcaatactttattgtctttcaggaaagattcttctgtcactctccagcctaaagctaccgaagggaaagtaccccaacgtacattcttggcgaaacgggaagtggcgtcccggcggatagtcgtagtcagcatatagcgtgaatcgaaagaataattcagacggccgtagtaggagagcaacacgtggcgctcatctttcgctttggatgtcttttgtatctctcccaacgtgttcatttcgctataaagcggtgtagtcgatttccagtactgatagtcgtaaccggctgtcacgtcaaagctactcttgatagattcgacgagcttgttgtaattggcatataaggtaagcagacggttctccttcttttcggggccgtagctgtaatccagaccggaagtattgtagttctgtgccgcttctgccggaacatatacgctacctttaccttgtgcgtagtcatagcccagtgtagcgtgcagtttcagatcggggaagaagtgaacacggtaatccgcatcgacatttccgataaaacgccttacgttactttgagaatcattcatcttgataagtcctacgggattcattacggcgccgttgacaggggcgcctgtgttgtctgtcgcttccgtgtatccgccgaaggtatccagtcctgaataaacgggaatggtcgggttcatggtagcggctgcccagatagcgtctgtattgccgaatgtattgttgttgatagaacccttggcgttaatattcagcttcaggtggtctttgaagaaagagggagtcagcataatgcttcccgtatagcgttccgcattatcagtgcgtagcagaccgctttggttataataacctaccgacacacggaacggccagttcttggcaatctttccggagacgctcagattattatccgtaccgaaagcattctgatagatctcatcgttccagttcgtgcgggctgttcccaacagagcttgctgggcagaagttccttgtgtccgaatcgtgttgacaaattggtcgtagcttaacatatccgccagtttggtgcgtgtctgaatggagttggtagtgctgaatgtgatttgcagtttgtccgaagtccctttcttggtagtgataaggattaccccgttggatgcacgcgaaccgtagatagcggtggaagaagcatctttcagaatggtcatactttcaatgtcgttcgggttgatgaggctcagaaagtttccgtcgttcccgctgataccaccctgttccaaaggaacaccgtccaaaacaatcaacgggtcgttgctggcattcagtgaggcaccgccacgcacacggatggtacttcccgccgtaggcgaaccactattggacataatctgcacgccggagatttttccgttaatcagttgctcgggagagctgaccagtcccatattgaagtctttgctgctgacgtttgttaccgaaccggtcaggtcgctttttcgttgcgttccatatccgataacaactacatcactcaatacctgtgaatcacttttcatctgtacgttcagtacagagccgcttgtaggaagggcaactattttagtctcatatcccacataagagaattgcaactctttgttgccctgcggtacgttcaatgtgtagttaccgtcaaagtcggtaaccgtaccggtagaagtgcccacgatgaggatacttactccgatcatcggttctttgttctcatcaatcacttgtccggtgattttcttgccgccctgttgggcaaaggcaggaatgatacctcctaaaaaggctgtacacaatataaggagtacagtcagttggcgtagatttaagatattcctgttcataattaatgtgttattgataatagatttattgtattattattgtttgggacgctgggtgaacatatccggctattccagccacacgtctccaagttcaatctctacggttggtttgccggttccaggcattgacagttccagtttctctatcttctccggtcggaaaggaattaccgtctccgggtggaaatactgtttcaggaatgtcggataagctatgggcaacaatgcggtatccgttagacgcagttctttcagaggaatccgtacaatgccttctgctgacggagcagggcagagacttttgtaggtatatccgtccgaagtgacaaaacctgcgctgagtccttgcggaagaggtttgtttctatttacacgaatacagagcgtagtgcaacttttcactttatcttttcttccttcgatttcatcttttacgaatgcgcggaggaagtgttgcggattttttcctttcggtgtgaaacagaaccggagcaacggcttctcaatcggagaagaatcaagtaaggtacgttgcaggtcgttccattcaggaagtgtatatgcttctatccggctatctgtatccgttactttcagtagttgtatcgcactaccagaagcgacaacacgtgtagtccagtagaaatcggaagtatagttccagtccaatggacttccttggattcccgaggaacttccggtgacggaatttccggcgggataagtatgggtgctgtcgccccggcagacgatgatgttatacttgaaacaatcttcctttatatctgcagcgggcaggatagcctgatatgtatagccgcttgtacgtttcatctttatatacgggttatgctcgttccaaaaagacaccttatccgtgtatataatgacagaatccggaaaaacgcttcctgctacttgcgcattaataatcaatgctttgcctgcttcggcaatgcttgccggagtatgagtgaccttataatccatagtacggggagtgggagctacaaactctccgatacgaatcgaattccaacgtgaatcagctttccagttctgttgcggggtacaaccgtttcgtttcaacaggtaaacccccggacgaaggtcgcaaatcactccattcgtcactgtttcttctttccggtcgttcttcttgtcgagagctgtgagagtaaacgctttgcccaaatccggaattcgtaatgccatatcccaagtaccgtagataatgctgactacttcttttttgagtgacggcttggcaaaagggtcattgactactaccgcatccggcattacttcgagtcgccatattcctgattcaaggcaatcaatgaaataagctcccgtaccttcatagtccactatcggcgagcttccgcatccggcgattgaaaccagctttgatgcatctttgggtggtgtatttgtctgattggagtaataaaacttctctccattattcaactcgcttaaatcttccgcatagctgacgcgaaagccattaccgaatatggtatcctgaggataactcccatacgattctcctcttttcaaactccgtgcagcttcggcggcaattttcatgctgatagccttattcggagtataggcaagattcagaaaatgagtctgatactccgtattggcgaacgcaaggtctatcgggtcataagcaaactgcgtaatccattggaaaccggccgtgcggaaagtccttaccatggccggatacatataagagtacataatatccgccggatcgaattcataaatcatccgtgctttcttattgaattctttcacttttccggcgaaaggaatgtcataacggtctacgtaaggaaggaaattcccttgttgtgtttgtccggatacgagcccgataggataccattgataggtagttccctgaacagtcgtttcataataggcttctgccacatatccgttgtgacttacattataaaatactggtttacggtttcccgccttgctcattgatttcagcatacggttgatgtaggcttttacttcttctttcgtaccggaatggcagggttcgttattgatctcaaaacctacgatagaaggatcgtctttataagctagtcctgtataaggattagtatgtttcaccaagtcgcggagataagtttcctgtgcggcaatcgcttccggattagaatgcatatcgcatttatcatatttataagagaaaccgccggtttgtatattccgttcggggtatccgtttccgaagttagtctgtgcggtgatgacaatatggatattgcgctccttaagtttggcaattagataatccatgaggtcaatatgctcgttttcaaggagattaccttgcccgtctgtcaactccacgtcccatagatgaatacggtaagcattcagtcccaagcgggagagatgatatacatctttatctatggcagctttgcggtcgagtcccaaatagccgagtgcgcggtaggcatgggcaaaaggcagggtgtagtttactccgaagaaagaggcctcttcgtgggtgtcgctccagcgcatcactccgtttccatctatatatattataggtgtagttactttcccctgtataccggtgaaggtaaacaacagacaaataaaggtaagaataaactgtcttttcatgctatcaaatttggcgggttatttataccggcaaagataagataggtgctgatttgatgaaagcacagattggacatataaggataaaaataggacgaaaggtgcttttcagccgcgattaggccataattagttccaatatgtgcttttatgaggttcgtctatttcacctcttgcacagaataaccgtagaatatgaactggttgttaccgttcttccatgcaatctacttatagataaatttctttccctcctttacaaattttctccggtctaacggcaaattttctttccgtctgctgtaaactataaacgcaagcttcatttttataaatacaatttgcatttataaaaatgaagcttgcgtttatataattagaacttgcgtttatagtttatatactatcaaaaacaacttaaccgttagaccggaaaaagttaacttctaatgcaacaggatttatctaacgatagaccggaagaaagataataggttgcaatggacaaagcgctacatgatgaaaggtaaaaacacagcaattaatgcctcatcctcacccgcaagtgctttatttattgtgattttcttcgtcaacagcaggctgcatatattgcttcggcgtttttccgaactcagcctgaaaacatttggaaaaataagaatggttggagaagcccaccatatacattacttcggcaacggtgaacttcttttgctgcaataacatggcagcctttttcatccggattgacttgatgtattctacgggagacattccggtcaattgcttaattttccggtaaatctgtttgttactgataccggataattcacaaagagcattcacattcagttccgactccgaaagatggtcttcaatcaggcgaattatattcgacaggaatttctcgtcctgcgattccgcttcaatcggtttgagtacgggcaacgattccagtcgcttcttctcctgtgtcgcggggatttcctcttcctccactgctatgacgggaatattcaatccgacggaagtcccttttccttcttcggaggtgacgccggtgatgtgtccgccgtgcagttctgtgtaagtttttaccagataaagcccgatacccgtaccttccttattaccggagtggggggattggaaaaaacgttggaagatgtaaggaatgtcccgcggcgggattcccgatcctgtgtccgatacacagatatccactaagccggtttcttcgcgatagaaaagagacaaccggatactgccgccgtccggagtgaatttcactgcatttgaaagcagactgtctagtatcactcccagtttgatagcgtccatatcggcataaatcttcgctttgtttgtctcgaaaaggaaagtcagccgcttgtcttcttcgtagacggagaacagactgtggctgaatgacacaagttcgatacgcgacagtattagtagtgaatcttcgttatcttctatacggttgaagttgagcacctgatgaatcagcgaattaatcttcatcgcattgcgttgcacttcttccaatgtctgtttctcgtgcgcttcctccgtcgcagggagcagctggctcacgggtgcaataatccggctaagcggtgtctttagctcattggataggttgctgaagaaagccattttctggcgtgactgttccagaatcttctctttctccatacgttccattttcaaccggttcttgacgcggaagaaattgattgtccagatgatgaggctgaggaacaaaagaacataaatcacctttgcccaaaccgtataataccacggaggcaggatcttgatattcaaaatataaggatgttcggacgggtggccactcttttctaccttactgataattaattgataatctccgtagttgaggttgctgtatgtaatgcggtttgtattcgatttcaggaaattccattctttgtccattccctccagctgatagacaaattcatgcttttcctctagcgaataggggaggtcggaaagttcgaaagccagattattctggttatatgccagttcgatagagttcgtataacggatattaggtatgctttctccggtgtgcggagacatcaactggttgttgatatataaagcagtcagcaggatcgggcgttccggttgattcatagcctgtatgtccggccgggaaataccgaatccgtccgcacctcccaaatagatgttttcgtctttcgggtcaaagaaaagacttgtgaaacgcttgtctgtcatgttctgttggcgtgcatccattgttttccggtcgacaatccaaagcccgttggttgtagaaatccagatatgctcttttacggaagtcatagacagaatttcattgttactgaagctgccgaaggtaatactttgctgaccggaatcttggggattgatgcgcatgaccccaccgtgaaatcctacccagagcataccgtcctcatctcgtaggagataattcgggctcttttcaccgctcaactcttcggcaaacaatttggttacttgctgcgtgcgcggattgattttgtctattcctttgctgttgtagagcaatacccatacattaccttccgcatcgggaacaatttggttgatgaacattcctgacaggccgttgcgagtggaatagttctgctcggctatgtaggttccgccggaagattgtaccagtttttgtttgtctactacaaaaatacctccgaggcaggttgctatccagagttttccgtcggtgtcttcaaacaggtaataagcccagttggtgttgtttgttcctgtgctgtctacgatgttgtagtgtacaaattggtgagtcttgtagtcgtaacggttaatactgccgtccgtggctatccagagttgttgttctctgtcttcgtagatgtgtcggatacggttgtgggacaacggatggtgcttatctcccattctgtaccagacagcgtcgtgcttgttaccggtggggttggtaaaacggatgactccgttagttcctccgaaccagtagaaccctttggaatcccggaacagggaataaaactggtttccgtctcctgtacccgtgatttgcgagataggaatgaattgcaatgcactgttgtagcgtgaaagggagatgccgtaatccgttcccagccagatgttctgttcctgatcggcaaatatattccagataatattgttggttagcgactggatattgcgggagtcgtgtacgatgtgttgcagtgtcccattatcgttctggtaaacataaagtccgttatcggtacccgctaataaatttccattcccgtccaaagccagtgatttaatggaattgttgtggaaggcatctatcggtttcattagtcccgtggcctgagtatattggaaaagagatccttccattccgatccagatacattggcgggacgtatcttccaacaaagagttgacaaagagattgctcacgctccggttgacgggcaacgggatattttcaaactttccgctttcctctatatatcggcataaaccattgtaggtgcctacatatatctgattgtccgttgtgcggatgatagaataaatagtgtgatggggaagtccgttgctcttactgtcgagtgaagccagtttctttgtgttgagttgatacgtatacagaccgttcaacgaacctatccataaggtgtctccttgaagcgccattgtccgtacatctgtcgggaaatccgtttccggttgttcgtatttgtccgtccggtagttgtagacgaggattccgttatctgtccctaaatataaataagtattgtctgctattattccgcagtaaatgcgcgtgttattgcgttctccataagtgaagtgctgctgtgtggaatatccgtcgtaactgaataaccctttgttggaacctatccatatcaacccttcgctgtcttgcaggaagcaactgatgaccgatgcttcggcaccgaggtagatattctcgaattgttgataattcactttctgcccgtatgcactgccgcctatacagaatgcacagacaagaaaaagaatcgttatcattcgttggcacatattgtcaggtttgcaggtttttaaatcagtaattattgcaaataactttgttctttattgcaaatgtaggaaaaatgccggttactcttgtaaatctcaccgtctttttgttcctttgtcgtctatttataaacagaaaacttcaggatgaaaaagcttatttatctgcttttgttgccgctggttgtggctgtgactgcttgtggcggtaaagtaaactcgaaaaaggagtcggtattggcaacgcaggatagcgtagacgctcgtggaatacaacggatgcagacttctaaaagtgaaatagacatcaaattcaaagggaaggattatcgttctttcgtttcccgtacaccggacgagagcctgcctcatgttaccaatgaaatgggggatacgtatatggataataaaatcgtgctgcgtctgacgcgcggtggtgaatcagtgttcaacaagaccttcaccaagaatgatttttcttcggtagtggatgccgactttctggcaaagtccgtgctcgaaggaatcgtatatgataaaacaactccgcaaggcattgtatatgcagcgagtgtctgctatccgcagacggatttgtatgtcccgctttccataacgataaccgctgacggaaagatgagtattcagaaagttgatatgctggaagacgcgtatgaagaagaaacacccgattaagcctgtgaacaggctttttagtagaatagcaccaatgtgaaagcatttgagacaaacgaaaggcaaccgaaaaaggttgcctttcatatttttgtaccgttgataaatttgctgtcctgtttttatttgtataccgaggactgaaagttaaagaacacaaaaaaaagactgttcttcggttattcccaaatctttcctaaatctgtatcgttatttgctgtataaaataaagtatagtattaacgttaaaaaaataatgattatgaagaaaattctatctttactcgtgttggctattgttgccgtacagttttcatgggctgctgatgtgataactaaagacatgaatcagttaccgcttccggcacgcaattttattaaccgtcattttactaaacccgaagtgtctcatatcaagattgataaggaaatgctggaggctaccaaatatgaggtgttactgacagacggtacggaaatagaattcgacagcaagggaaactgggaagaagtaagtgcccgaaaaggacaggtgattcctgcaagtattgttccgaactttgccgttgattatctgaaagcacataattttgctgctgaaggagtgacgaaagtggagcgtgaccgtaagggatatgaagttgaattgtccacaggcgtctctttcaagtttgacaagaaagggaagtttgttaaagcggacgattaagtataagtgatagtataataataaacctgaaccaaaaaagtaactatgttgagatttaagtttggcgcctgggcggtggttctgatgttggctgccctttcattcggcgcctgttccgatgaagatgatgatccggctttcaatccgccttccaatattacggaagccttgaaacaattatatccggcagctcagaatatagaatgggaaatgaaagatgtgtattatgtggccgattgctgggtggccgatgacgaactggaagtctggtttgacgggaatgcgaattggctgatgacagaaaatgaactggaaagtatagatagtttagttccggctgtatatactgctttcaataataccaaatacagttcttgggtggtgaccgatgtctatgtactcgtttatccgcagaatcctacggaatctgtcattcaggtgaagcagggaagccggcgctattcactggttttctcgcaggatggtggattgctgcacgaaaaggatatcagtaacggggatgatacgatttggcctccggcagaataatttcttatccatttaactgaaatggaaagagtgacggtatcttgtcaggatagcgtcactcttttgttagtatagtgacggtcttccgataagatagcgtcactataattgtaggtttacatttgctggtaatctttggccaatcctccttcactcgtctctttgtagagtgagggaaggtcatgtccggtttgtttcatcacttgcactaccttgtcgaaagagacacgatgcataccgtccgtaaaggcggaataaagatttgcgtcgagtgcgcgggcggcagcgtaggcattccgctcgatgcagggaatctgtaccaatccgcatacagggtcgcaagtcatacccaagtgatgttccaatcccatttctgctgcatattcaatttgtgccggactacctccgaataattggttggctgctgccgatgccatggcacaggcaacgcctacttcaccttggcaacctacttccgcgccggagatagacgcattgaatttgacgatgtttccgatcagtccggcagtagccaatgcacgcaaaatacgcatatcgctaaaatcacggctcttttgcaggtgataaagtacggcaggcatgacaccgcaggaaccacaggtgggggcagttactatctttccccccgaagcgttctcctcgcttaccgccagtgcataagagaatacgagtcctctcgattgaagggactgtttgtatccggtagcacgtatataataggtagaagctttccgtcgcaggttcaatgggccggggagcactccttccgcttccagtccgcggtggatggcttctttcattgtatcccatacttcagcgaggtaatcccagatatcttcattctcgcactctttcacatattcccagtaactctttccggtacgttcgcaccattccagaatttccgtcatactgttcatcccatatacttcaggactttcaattgtcggattgctgttgttttcagctagtgcgcctccgccgatactataaactgtccaattctcctgaatcttgttgttggcgtcgaaagcggcaaatgtcattccgttcgggtggaaaggaagaaagactttcggttgccagatgatttctaccggggcggtagttttgagtgtgtctataatggctacatccgtcatgtgcccttttccggtagcggcgagacttccatagagtgttactttgaaagaggctgcatccggatgacgttctacgaacatttctgcagctttgcgtggacccattgtgtgactgctggaaggaccagtaccgattcgatatagctctttaattgatttcatgagttatgtgtgcttaattaataccatttcttttttctaaaatacaaatatacaacaataccgataactcccattaaaatccatgcaaataaatatccgtatcgccaatcaagctccggcatccatttgtaattcattccccatactccgactaaaaaggtgagagggatgaagatagtggatacaatggtcagacgtttcatgatgtcgttcatgcgtaagtcattgttggatatatatagatcgactaatgaagaaagcgtttcacggcagatttcaatagtctggagaacgaactgtaaatggtcattcacgtcattgaagaacgcacggtttactttatggataagcaggttttccgcccgtaacagttttacgtattgttcctttagggggagaatggatttcttcatcagcatatattgacgccggagtgactggatctggatacctatatcattttcgtcggtgatagtcagcaactcctcttcaagatcttcgagggcatcgtcgatagaagaaattgttgagatgtaattggtcattatactgttcagcagtacactgagcaaataatccgtctgacggctacgtattttcagtacatcattgcgtaaggcagcgttaatatcatcgaagaagtcggtttcctgttcgagaaaggtcagcacatagttgcttcccagaatgacacagacttgctgttggagcagttcgtccagttcgttttcctccttatgggtgttgggatagaataatttcaggatgagaacgatatatttatcatgttcttcgattttagtcgggtggtctgcgttcaggatatcctgcaaaacaaggaagtctatttcaaaatgagcgcaaatctcgcggattgtttccgtatcttttaaaccgtgtacttgcaaccagttgattcgcgcactgtctaatgttgctttgacggattggaaggtgtcgccggagctttcctgcatctcagtggcattgtaggtgcagagatgaatgtgggtaggagtaaggctgtcccctgtgtaaatgagcttttcgcttaataggttatttttcatgctttattctcgttttagaaaaccaccgcaacaaaggtagtggttttctaaatgagaacaagttcttgcgacgttttgtttacaatatgtcttatatccgggtcaatcaaaatctactactgtgattccggcacctccgaactgcacatgctcgtcggcataatggcggatactcggtacggtggacagatattggcgaatgagtgtacgaaggattcctgttcctgttccgtgaagaatacgtacacggtccatgccgaccaatatggcatcgtcaataaaataagtgactgcttgcaacgcttcgtctccgcgcatcccacgcacatcgatatcttgtttgaaactaagtttcttttcgtacatctggtcatgtgtctggctgctgacaaaggaacttttggccatgctttccgtcttgggggccgcgttggagcgttcgagacggtccaacttgacggttgtcttgatacttccgaaggcgacgattgcattcttgccactgatttccattacctgcccgacgctggtctggcctttaattttcacattttcgccaacggagataggagccactttaggagtagcggttgttgaggaacttgccgctttctgctcgttctttttattcttcttccgttcctgtttctctttcagtttctccattttccgagccattttttcttcttgttccttggaagccaatgcatccaaagaagtacggaagtcagttagctcctgacgggccatgcgggtcttttctttttctgcctgtgcctctttaatggtacggatcgtattttcaatacgggcattcgattcctgtaacattcgttccgcttcctctttagcctgccggataatctcttttcgtgatttttgcagttcttccatttcagtctgatagcgggcgatcgtttcttccatgtgcttctcccgttggcggatcgtttggcgtttcccttcccagtaacgtttgtcgcgcacgatatcctgaagatatttgtcggcattgatgtactcgctccctacaatttccgaggcgtcagcgattacatcttccggcaatccgattttccgtgcgatctctacagcaaaggagcttcccgggttaccgatctgcaattggaagagtgcctgcattaaatggcggtcgtaaagcatggcgccgttgactacgccttcatggtcttctgcaaaatgcttcagattttggtagtgggtggtaatcactccgaaagtccttttctggttgaaacgtttcagtacagcttcggcaatggcacctccaatctgcggctccgtacctcctccgaactcatcaatcaggatgaggctacgttcattgcaacttttcatcattatcttcatattggtgaggtgagaggagtaggtactcaaatcgtcttcgatagactgttcatcaccgatatctatgaaaatgctgctgaatatacctgcatgactgcgttcgtgcatcggaatcaacatgccgcattgtaacatatattgcaataagcctaccgttttcagacagactgatttacctccggcattcggaccggagataatgagaatacgctgtttcttgtttaattctatgtccaaaggtacgacctttttcccatgcttggctagcgacagttgtaacaagggatgtacggccatagtccagtccagtaactgttcattctctatggcgggtttcagactgttggtctgtatggcgaaataacttttcgcacggataaaatcaatttctgccaaaaattcatacgactggagtatctccggaatagacgggcgcaacacattggagaattccgtcaggatacggataatttcccgtctttcgtctccttcgagttcgcggacgcggttgtttgcttctacaacctccgccggttcgataaatacggtttttccgcttgccgattcatcgtggacgattcctttaatcttacgtttgaggcccggagcgacagggataaccaggcgaccgtcgcgcatggtaggggctacgtccttatctacatatccttcggattgcgcactgcgcagaatactgttcaacgagcgggaaatacttcccattgtattggctaattctctgcggatacgagccagttctgtagaagcattatcttttatctttccatatttattgaggataccgtctatttttccaatcaattgggggaatacggcaatgtctcccgccagtcgtttcagactggggtaggggctatcactttcttcttcgtcttcattgttccgatgcaggaaacggacgatatcacgaatggtctctagtgaacggcgcaagtcgaataattcctgttcgtccagatacattccttctatccgtacccgtttcagtgaagggcggacatcgaaaaaaaattggtcgggaaatccgtcctcttcttgaatgatgcgaacaaactcggttacttggtttaaattctcttctactacttcatattgttcggaaaagcccatgtctgaaactttttcttcgcctaaagtgctaagacacttgtctttcagtaactgccttatctggtcgaatcctatcttttgctcaaaattttgagggtatatcatatctttattccttataactgggcacaaaaatacgattaattcacgaaaaaagtatcagattgtttgcagatttaaaaatgattcgtacctttgcaccgctttcaacggaaagcacttctgataaaggagttttggagaggtggcagagtggtcgattgcggcggtcttgaaaaccgttgtaccgcgaggtacccggggttcgaatccctgtctctccgctgaacgtgctggacagaaatggtcagcaaacggacaaaaagctacaaatcaatgatttgtggctttttttattgcccgaaagtcctgcttccaagacttcaaaagtacggtaaaagacaaagtttcgttactaaatcgttacctattccccgccggacaaaaacggtaacgatttgtccataaatgacctgataatgactatattagtccatagtctgcataactcgaaaacgagaggtaaaaactaattttgcaactaaaaattttgagttatgaaatcgacattcaaggttcttttttatttgaagaaaggttctgaaaagaaaaacggcgaggttatgattatggcacgcatcaccatagacggcaaactttgccagttcagtacgaaacagagcatccagcccgacaactggagcattgctgcgggcaaagccaaaggtagggatgccgggaggataaacgcccttttggacgacatacgttcttccctgaataccatttaccacgaaatgcagcggcgtgacaactacgtgaccgccgagaaagtgaaaaacgagtttttaggtcatagcgagagccacgaaacaatcctttcattgttccaaaagcacaatgacgatgtgaagcagcttgtgggcatatccaagacgatagcgacctaccgcaagtatgaagtgacccgccgccacctcgctgaatttatccaaagcaagtacaacgtatcggacatatccataaaggagataagcccgatgttcattaccgattttgagttgtatttgcgtaccgcctgcaagtgcggctacaacaccaccgccaagttcatgcagttcttcaagcgtatcatcattattgcccgcaacaacggcatactggtgggcgacccgttcgccagctataaaattcggctggaaaaagtggacaggggttatctgacagaggacgagataaaaatcatccttaaaaagaaaatggtttccgaacggctggaacacgtcagggacttgttcgtcttttcctgtttctgcggtttggcttacagcgatgtcgccaacttgcggcaggagaatattcaaaagtcctttgacggcaacctttggataatcaccaagcggcaaaagacgaatacggacgtgaatgttcccctgctggatattcccaagatgattttgaagaagtacaagggcaagttgccggacgggaagatacttcccgtaatcagcaatcagaagctaaacgcctacttgaaagagattgccgatatatgcggtattaaaaagaacctgacattccaccttgcccggcacacgttcgccacgaccaccacgctgtcaaagggcgtacccattgaaacggtgtccaagatgctgggacacacaaacatagaaactacgcaaatttacgcccgcatcaccaacagcaagataggcagcgatatgcaggggcttgacaagaagtttgtcggcatcgagaagatttacaaggaagtcgccatgtaatcttgattattgggaactggtcacaatttgtgaccagtccttactattattccaacattgctaaatttcctaaaatatacgattatggatttgcagattatccaaaacaatatttttgaggtcagaggttgccgggtgatgctcgattatcatttggcagaactctaccaagtggaaacacgagccttgaagcaggcggtcaagcgcaatatcgagcgttttccaagtgattttatgtttgttctcactcaagaggaagctaacttgctgttatccataggggtatcacaaaatgtgataccccctgattacaacttcggcgttgctatgcctatggctttcaccgagcagggcgtagccatgctttcttcggttctccgctccaaagtagccatagaagtaaacatttcaatcatgcgggctttcgtcctcatgcgccaaatggcaatcggttacgaggaactgtcaaggcgcatcgaggaactggaggtaagcaccgatgcgcagttcaacgaactgtaccaagcccttacccagcttctaagccagtcgaaacaacagaaagaacgccgtccggtaggtttcgttacctataaccgtgacaaaaacgaataggtaacgatttcggtaacgaaattccgcctaacaaactatatcccaatgaagtacattcttccaccttgcgggcagtccaccgactacccgcattttttatatccttttccaactggcacattccccgaaacgccagccgtgcgtggcatggctgactgtattccgtgaaaagagccgttggaaacccgcacaagcgtattgcaagcaagctcacaacacccttgcctttcccgcccgcatggagtgttccctaaaagatgaaagagaacaggcacttttccccggtttccctatctgtaaatcttcctcttacgcagtcccccagccgggacagtcgttttaatcatttcaataggcaaaggtagttacgtgttcttcacgattttgcaaggtcgagccgttccggtttggcgaaaaaatcttccctgccttgcgaggtattttttgcccaaaaccttgcaaactctaaacactacccttttacgcctatgtgaaacgaaaacgaccgacccgaccggaagacgcataaaaaaaaagtcggatttacgggaaacaggaaaaaagttcagtgaaacttcaactccctcacctctcaaatccgcataaaattaaaaacttaaaaaattacagcaatatggaagcaaaggtattatcggaagcaaaagtttatgtaggcacttatgtcaagtacaacaacggttcattgtccggcgcatggctcgacctttcggactattcggacaaggaagaattttatgaagcctgccgggaacttcacaaggacgaggaagatgcggaatacatgtttcaggactgggagaacgtgccggagggcttaatcgacgaaagctggatttctgaaaacttctttgccctgcgtgatgcggtggaggatttgagcgacaccgagcaggaagcctttttcgtgtggtgcaactataaaagccatgatttgggcgaggaagatgcggacgaccttgtacgggatttccgggatgaatatcaaggggaatatgacgatgaagaagatttcgcctatgaaattatagaagaatgttacgacctgccggagttcgcaaagacctatttcgattacaaacagttcgcccgtgacctgttcatgtgcgattactggtttgatgacggctttgtgttccgggcggcataacaaccaatccgggcggggtgtcaaagccctgcccgctaaaaacaaccaagtttataaccataaaaaaataagacatcatgcagtcacttaacaaaaacggggtaagcatcacccagacaccgggagaagaaaagttcgtgaaatgccatttaggggctttcaggggacagatttattttcaatatgactaccgccacacggacggcgaacttttcagcacggtagccaaaacgctggacgagtgccgccgcaggcgtgacgggtggatagcaaagaagaacggagtaataaacaagtaaattttgggggcatgaaaacgacagaagtaaacaaggagcttatcggcaggcgttgcgagtgcatttttacgggcttaatggtaacgggcgttatcgaggacacagaagaaaacgaacacaccatagaggtaaaagtccgtttcgaccacccgcaccaatggggcgatgatttgtataatgatgtgtgggcgtgggggcgcaaaattgacgatttcggcacgctgcaccatttgcaactgctggcagataagccggactttcagataatgacggtagttttcggcgagccaatcagccggatagaccgcagtgtttttgaagatgtggacacgtggggcgtctgttccctgcaaggctgggtaaacagccacgagagtgtccggtttgtagccataaacgaccatacggcaattatcacgggcgaatacaacatggaacaggtaaaggtgtggttagagaaatacacgtccataaggagccttaaaaccagttgatagagaacggcggctgtttgccgccgctactttctttcgtgagtgccgggaaataaagtagcaaagaaacccgcctatattccccaaaaattattagcaaccaatgccttctgactagctgttggttagccaataatactttctgtctctctatactgtttgtatatattcaatacctggcaatttcataaaacaactataatttttttcaaaaatgcccctatttgtgagttgtttatgacttgccgtaaaaaaaacttgctttttagcccgagtaactgctacataaatacacttaattcctcaaagaatgatttttctatatctttagtcatcacaaaattacagtcatttccatttttacatctaccgcataatccataccagttaggaaatgaatctttttccatatcaggaagtattacataatcccattctaaaccttttgctgcatgtaccgtagagattattatagacgtatttaagaattccatatattgttttataccattatgttcaaaggtatctttaatcagattaattttatcttcattagataaaaacgaataatcgacaaaaagctgaacccaaaaaatttcgagtaattctaaaagagctttaacaagtacggaatcattgttaatatatatttctcgtattttatcaatatgttttttccctatctttttagtaatctttgaatttgattttagtaattcaataaattcatacagacattttctgttgaatgttatatattcagagtcttcatctgtaaataatccataaaagaatggtatcttattgtgattgaaagtttttataatatgctcaatattaggtcctctttgctttgcaagtatggcaactttagcaaaggaatcgttttgtaatattttttgtgacttaattacaacttgtaaagcttcttcttcttggttatcatagatattaaattccaccttggattttaagctattagggttatcaaaaggagtaatagcattttgccgtattattttatccaattgaagcatattctcattggatgcaaaacgataattcttctccaatgaaataagttgtaaattgaatgtattttgtgcatgtgaaagtaaattgggtacggctcctataaatccataaattcgctgtaaagaatctcctaatagcaatatatttgttttatctgtaattaagaaattcaatagccaataacttagtagattggtatcttgaaattcatctacgagaattgatgtataataatttcggtaaaattctaatattccaatttgttctttaaacaatttaattgttaaagtaataattgcattatatggaatggcattctttattaatagtttggagatgacaatagaattatatttatcaatattttcttttaaatactttccttttatgtttttaactccggcgttgaattctgacaaaacattcgcttcatctattgaaatattattaaatactcgcattatactatcacttcgactatcatcaacggattgtagagtatctaaattcgacaatgcaggatgtagtctatgaccgtatttttttaaaatgcttcgacagaaaccatgataattagatacatatattttttctttaatattaatttgcttgcctaaatcctgcaatagttctggaatattcttacttacatcttttttaattttatatgcagcatttacgctaaaagttaatgctaaaagtttttttggaacaggtagcttgccgatagatattaaataggctatccggcttaccattgtatgtgttttaccatagccagcaggtgcttcaactaataatcgtttgttaggagaaaaaataatttctaattgtttttcatccccttggtgtttgttctcaatccgagattttataatttctatttcgttttgatacatcagcataaacttttagcttgttcaattagattgacatatatttgagggatttcgcttttagatagtttcattcctattaaaagtcccaatggttgagacttattgattccaaaccatgtagaataataggcttttaggtttgtgatatttgttttgtctatatctgataatttgaggtctgtactgataggtgctgttaaatagccatattttttatatgctcgtttatttaatgcttgtgcattcagaattcgttcttgtttttccgaatcatattcacaaagtatatcgcataatacttcctctcttcctatatcaatcaatttcattaattcagcctcaaaatcccgttctgttgttttccataaattaggaatacttgttggggtattatctccatcactatctctaatcccaatacaaggtataccaaatttttctgctaactgtatcagttgtagaacggaatctccacctgcttgaataacacatatcccgcaatcatctaaatctatatcacatttttttgcaaacaagggaaaacttccatattcagaatccccttcgacaaaaatagcacagcgagcaaagaatgcttctttgataaaaggaaaatgaagtaaaagatgtttttcaagttgttcgccgagagatagatttgttcctgaaactattttagtgcttgttccttctttataaagtcgaataatctgcttaaaatcattaagaataatacttggtgaatgtgttgcgatgatgatttgaccatctaatttatcaattccaaataattcttttattaataactttaagtcagaatcttcattattgataactttattgagatatttaataagagaacgttgcatataaggatgtaaatgtatctctggctcgtcaagtcctaatacaacagaaatagacctttctcctgtatcctcattaacaaatacccctgtttctccacgttggtcggaaattgtttgaagtttattcaaaatagataaagtaactagtaataaaaattgaattccatatccacattttgacaatgcccctcctctggcatcttgtaaagagattaactttgggaataacaatgaaacatccccctccaaaacagctttaattgcgtggtctttaaaagattttattttttcgaatgtagtatttacattagttaataaatcatttgtaaattcaatatcaactaaattattagtatttatatctgtattcgatacgtaatccttaatcattcttgataaaaaacgccctacgcctttactgctgtcaaaattaatttcagaaatgggatttctcaaggaatcatagtatataaagtttaagcatttaataagggttggagatatgtatgtttctgtttctaaatgataaaattccatattatcatcaggtgatacttgtttacagataatattgatataggtgtaatcatctatatcaaacaagtcttcaaaatgccctatttcatcatttgtgagttttattcgtatattaactgttataggtaaatttgcatcattaaaatcatcataaacaaatcctcttcgtgtgaaaatgatatttaacaggtttaatatatttgattttcctaaattattttctccaacaataaaattgcacgattcgtcaaatgtaattgttgcagaatttaagtttcgataattttcaacggaaatatcctttattctcataatgtgcagttatttttttataagttatttacaaggaacaaaggtaatcacaaaataaacacccagcaataaaacactgggtgtttatcaacatactaattccaaaagatttattcttcctcgctgctgtcattgttaaacgagaacgaaagttgttgcatctgcccgaagctgtcgataatataaatgtcaatcgtctgctggtctgtcgatgccgaggtgtagtagagcctgaatgtttctttctccaacgggtaaaggtcattgagcaaaagcaccgtgccgttatccatttccagctttcctttgccgtccggctggaaataccgtatctgataggcagtcggctggtaatagccgccacgcaccagtcggcagcgtatttcggcggtttccccgactttcagccttttgggtactggcagtgtttcgatgctgaacgggtacgcctgctgaatatccaagttgtcattacaggcggtgacaagcacgagggcggccacgatgtagcagcccatgatgattttatacattacattcttcatatacattattatatagcggtcagttgataatgaatttcagtcccaaagatacctgcgtgtggaacttgcctatgtccgagccgaacaacgcccgttcccttgcgttcaacagcag

SEQ ID NO: 611 - DNA, 99722 bp, Bacteroides caccae
  source 1..99722: mol_type = genomic DNA
tttaatttattatttatatatttgcgcacatacttaaaaacgtacattatgggacaaatattaccaggagtagtcgtagcttttgagaatcccaagggcggggtagggaagtctacgctgacagctttgtttgcaggttatattcattcgcagtcaaacgaagaggggggcttatccattgccgtggtggatatcgacgacatgcagaacactatcggaaaattacgtgaggacgaagccgaggacggaatcatgaaaaaggaagaagaatatgaggttatcaatatctcttcctcagagttcatcaaccaactggatttccttcaggacaattacgacattatacttgtcgattttccgggtaacctgaaacaaaacggtgtagttgaaacgctgcacttcgttgacgtgatcatcattcccttcgaaccgaaccagaccgatttaagacctacattgaccttttactataacatctatgaagggattatcgaaagccgtcgaaagattggtaaaaagactaccgtgcgtggtgttatgaaccgtgttcttccgaatgtgctggagttcaaagaaattttgaaaaataaaaaaaccttgcctttcgagttgatgcaaaactacatcaaggattcaagggttgactatcaacgcaatttaagtacgctgagtaaagcgtaccatcatccctgtgatgctttctgtgaagaggtattggaattaatctgtaaccatataggagaataaagctatggcaaccaacaaagaaaggacatcatcagccgccatgagaaaactcttgctgcaaagcgccagtaagaaagagcaggaaatccagcagatcggaagtgttgcggaaagcactatcccccaacctgcgattgagcaccccatccatgaagaggtgaaagaatcggctccagtcaaagaaaccgtccaagaacctcagccggaacaaatggaaaagccggaatccaaaccttccgtgcagtcttctccaaaaacagaagaaagcaaagtctgcggaaaaaaattctcggaatatctggaagagcgaaaattaaagaacaccgaagtaatccggatatccagcgaaacccacagaaagctgaagcagattgctatggccactggattaggaatgcacaacatcgcaaacaacattcttgaagacatattgaccagccataacaaggagattcaagcgatactgaagaagtatatgagcatctgattctactttcggaaaaatatatacgcctgttcgactgcatccgtcgggcaggcgttatttttgcacaccgttttagtgaaggccggcattgaaccgggacacttttacacaactgcggaaaaatccctttgcctattatcctggacaatatgttaaagaattcaaacctctacttgtttccacctcaaaattttttccgaaagtaagaatacggtaacaaaatcatttcttcgttttatttaggtttttagggatttaagtatttgtgggacacttttacacaactaataagggaggttttccgtataatcaactatattattgcaagttagcacttactggcatcttctcgtaaccgggacacttctgcacaactaaccgactattcgggacacttctgcacaactgaacaggaaagtcgggatacttttacacaactagaatctgcattcgggacacttttacacaactaaatcaggaatccgggacacttctgcacaactaaaccggccattcgggacacttttacacaactgggggatcggaaacagccgtagtcgggacacttttacacaactaaatcaagaaacagcacgaaaaaaatgctttggaatcttcatttatagggagttagattcactatctccgtaaaaaaacgtatctttgcatcagtaaacaacaagtgtccgcctatgaaggaaagtaatacacaaaaagagttgagcagagtccccaggactctcagcgagtcttccaacacgaaagtattggaagttctatttgatgcaggcggcactgtcatgtctgacattatcatttacgtggcatcttcacaaatgaaagatctgttcggcgactgctggttctccatcaacgatttttgtgaggtcatggggtatgaacgaaccaagttgcaacgaaaactgaccgagaagcagcttgatttcctgttcagcaaccaacgtccggtatatatcaccgaacagaacggccaaaagatagagcatccgatagagaacacctttgaagcggcgttataccgtttagggacatccaacctcagtgtagcatacgccatgaacggcaagacgcaatataagttcattcaaatactggaccgctttgagataaaggataacttcggcacgaaaaagcgcaccaagcggaattacaacgtgcatctgagcaaagatctgatgaatactttgcttaccgaatacaatctgctggaactgaaagactaccgtaacctgcccaaccgcaaaggctaccgcaagttttatctgaacctggcgaaaatgatttacctgatcaagtataagattgaccaaggacaagcaccttatttcaccgttacggttgaccaacttgccaaggaatttgatgtaacggtaaaggacaaccatgaccggaagaagaaggtgaccagcatcttaaacggtatcaacaaaaagctggagagaaccaaattccaataccagtacatcaaaggaaaaggggagaagtggccctacaccgtacagtttttctttgaccaggaaacattggaatatttcgacgaaaagataaaggcgatactgacctcgcaatatcacgatgcgcttaaatcatgcttcttgttaaacaagaaaggcattcccgtgagcagacattatcaatataaggatttctttaaattgggaaccggcgaatattatcatgaatttaccgcatggctttattctgaagaggacaaggagattaaggagaacatctaccgggatatctatataaaggtagtaggcattcgtccagaagaccttgccgtcaacttaaatccctaaaagttggaacaaaaaccataaaatagtatctttgcagcggattgtcagaaaattggcagcccgctttttacatacgtccgtctgtctaacaaaagagtggcatctatcgttaaggaattaacaacaacaggcgcatgcctgtaccagtatgaaactggtacggggcgtgcctttgttgttggaacgccacgtccatgttagagggtacgtttccgtacccttatataaacataaaacaaattcaatggttcaaacaattgccaccctgatagatgagacgctcatggtaatgggcgcccatcttcacgtgcggatgacagacgaagaaaaggcgtatcttgatgctcatttcgagcttatccatatcaaaaagggagaacacctcgtcaccaggggcgaggaagtatgctacctctattatctggaatccggcatcgtccagttatggtttccggacaaagagaatagagagatttcagcacggtttatccaagccaaagagttcatcaattttttcctttcacatgaagaacaccatgcccactacaatatcaaggcattggagccatgcaagatctggagattgcccaaaaaagatcttcatcagctatatgagttatccatcaatttcaacaagctggccagaatacatttggtaagatccatcaaccgcaaaataataagggaagaggagttttacacactggatgccgaagcgcattacaaagcgcttttggccaatgaaaaatggctgttacgttcaatacccttaaaagacatagcaagttatatcggcatcacgccacaagcattgagcaacatccgaaagcgcatataaaccaaaccctataagccgggcaggacagttttacacaactaatcctatccggcttttttctgtagaattattccacacctgccggtttacggcacatgtattttttaatgcacattaaataaacacgaaaggccctttaaaagcccttcataaaatttgtcctcccgtatataatctatatgtttggagcgaaaacaacgcgataagcaccttgattcggttctgccgacaggaatccgcgtaaattggaaacaccgtatgagacaaatagaaaaatatataacattaataacctaaagagtaattcccatggaacacatcagactgactgctatcagccttagcctgctgttatgcaccgtaagcgcttttgcgcaacgccattatgagaacatcccggcacttgaattgaactacggcactaacctgttcggcaatgcaggcaactattacaacctgtccttttccagatacatcaaccggacaagctattggaaagccgggtttagctattttgagaaaccttacgaatatacagccaacctaccgcaagtctctaccttgaacccggaagaaacgattcccgaaacgatacatgacaagggtaaggacttttttgtggacggcggttattacagaaccctggcctgcaacctgaaatccgtttactggggcatcggcctgggaggattcatcggtacagaatacgtccgccaccccgataaggaatacaacttcatcatcggcccgaaactggaaacggaactggaagtattcatcctgccccgaacggcattgcttgcccgcatacaacaacattggaatcccctatccattgacaagtggaacactgtctggaacgtaggaataaagatactgctctactaaccgacaaatcatatcaccatgcttattatcatattgttagccgatacaaatgtatccggcctgatctccttataccgtgaaataggcgccatgctgataggggtaggctttctatgtgccggactagcggtacttaaaaagctgataagcaaccacgagcgcaccaaagaggccatcatcacctatatcacggcattggtcacttggctcattatctggcaactcttatgaacgtagtggatttgatactggttgccatactcgcctgtgtcacgcttcacttttactttcggaaaaagaagaaagcactttcttccggaaaggagaaagagaagccgataagggaggcggtgcgcaaggaagggcaggagagagcctgtccggtcatctgcgtggtatttcagcctgagctggaagaagaggaattggctgccgagatagccgatatgtacctgcatggaagagcctactactactcaggcaaaccactgccggaacagccgaaagaagagcccatatccatcaagtataaggatgtgcaatgggagagactgaaaacgattcatgtttaattaaaaaataggaacaaaatgaaagcaatcgaaaatgtaagagaaaaagcgaaccaagtcattaaccgctatggaaaggttatcttcacctttctcatattcttcacgctgttgggaacggcacaagtggcggaggcacaaagcggcctgaagattaacagcctatccgaagtgacagacaaagccaaagagggtgcggacaccattctggacgtagccaaatacattttggcggcggtactcggcatcgctctggtctttgtcatctattcgcttgccacgaacaatccccatgccaaggaatacctgctcggctggatcatcgccgtggtagtcatcatggtagccttcctgattatctaaaaacgaagagccatgagaaccatgcgtaaaatcaacaagccgatcaagttcttcggtctgtcatcgggacagttcgccatcttcatgctgctgacggccatcatcatcatcgtgagcatattcaagcagctgcacccgatactcatcatcggaatcatttccgccattctgtttctatccggtctgctgttccaaaccttgaaaaaggaacacaaggccggtaacccggactacctgaccggcctccggatcaagaacgccaccccccggcagataacggacaaacggcagattttcaaattcatcctaaaacagcaaccatgataggaatcatcatactcatatccctgctaatctgtgcgctgtgcctgctgattgctctgctgtatatccggcagacagagatagaggtgaaggacaaatccgtggatctggaaagtgtcttgcctatccagaccatcacggagaacgccgtcatcaacgggaacggtgacatcaccgtcggctaccggctgcttctgcccgaagtgttcaccttgtcggaaagcgaggcgcaatacatccatgagcggttggaggctcttttgaagctgcttccggcaggcacggtcatccatcagcagaatttctactatacggggcgataccatcatgcagaatactcttccaatgccctgatagcggagaacaaccgtcatttcaacggcaaggagatactgaacagttacaccaacctgtatgtgacgttcacgaacggcagccgaaacggtaagatacgcaaaagcgcatcgggcacctcgctgatgcgaaagctgcactacccgttcaagcaaccttataaggaatatcagcaacggctgacagaaatggaagcctttctgatgaactttgagaacggtttgtcgtccatccagcagtttgagatacgcaagatggatgatacggaactgaacaacgccatctacgactacgtcaacctctcttacgagacaccggaaaacgatgccacgcagaagagcgtcaaccctatggctgtcagtgaaagcggaagcatgaaaatagggcagcagcacgtttccatcctttcgctgaccaacgaaggcgagcatcttcaggaactggccgtgccgcacaccggcaagtcgaaggcatacgggggaaacatagagataccggacagcatacggagcaaatgctcgatgctgtaccccgtaggacttggcctgccgttcaaccacatcgtaaacatcgtgatagagataaccgatccagatgccaccgtaacggccatcggtgcggagaaagacgcgctgaactacatcaccaacttctaccctccggcggcagagaagcaacgcgagcaggcagccttctgcgatgagattacccagttcgactaccagaccgcctataccgccttcaatgtcgtgctgaacgatacagaccgcacctcgctcatgcggaaaaccgcactggtacagcaaggcttcagctttatgaaccaaagttcgtgctatgtggagaacgccgagctgtgcaacctgttcttctgcaacatacccggcaatgccagggccaattaccggggcttcgtcaacacgaccaagcaggccatctgctatctgcaaaaagaggggatgtacctttcggacgagaaagggcatatctaccatgaccgtttcggtactcccgccaagataaacctctgggattatccggcgctgaacaacaagaaccgcatcgttatcggcccgtccggttccggtaaatctttctggctgaacaattacatcctgcaaagctatgagctgggccgggatgtgatgatcattgacatcggcggctcttaccgctcgatgatagccttgaaccggggcaaatacttcgactctaccgagcagaagaaatttgcgttcaaccccttcttgtgtgaccgtgacaagaacggcaaatacctgtacatcgacaccacggatgccgagtctgccgatgaccagataaagaccatcgtcgccattatcagctacatttggaaggtacgtgaacccatgctgcctgccgaaaacgccattctcaggaaatccgtcatcggattttacgactatgtgaacaattcttcaataggagagaagcatgagcgtatcttcccgacgctgataacttaccgggcttatctgaaggaagtgttcagcaaacggatgaccgagtttgagaaacagaaattcgagatagaggagctgttgcttttactggaaccctatacggacggagagctgtcattcctgctgaacgctaccgagaacgtggatatcgtgcatgaccggctgatagccttcgatatggaagatgcctctaagaaagagtactttccactcgttgccatcatcaccctgcaaatgatcgtggataaaatcaagaaacgccaggggtttgccaaagagctaatcatcgacgaagcactcgacttcctgcaagacgagaaattcggagacttcatcgcctacctgtaccgaaccttccgtaaaaaggagggaagcatcacgctggccgcacagaacatcctgtttttgaaaaacatgccgtccagtatcaaggactccatcatcatcaactgcgcgaccaagattatcctcgaccattcagaacaccggcagaacctgccggaagtgaaagccgtgctttccatcacggacgaagaggcctatatgatcgagtcgttgcagcgcacggaacgctggagagagtttttcatcaagatgtcgaacgatgccttcatcttccgcaacgaggtgtccgacttcgccgccgtagccttcgattcgcgccaggcgacagtagtacgactgaagcagttgttcaacgaaagcggctcgacctatacggccatcaaccgctatctggaggaaaggaggaaaaagtatggatgacgccacccaagggctgaccgcccttctaggctggtcaaccgacttcaacggcagcgcatacaatcttgccggaagcattgccgccgcacttttgggcgttgcgctcattttcgtggtatgggcactcgccacgaaaaaggaaaatgccaagagctatctgacagcctggctggtatgtgtcatattcaccctattattcatcaccaacaaataaccgtcatgaaaagaatcattctcatactcggacttgccgcctcgatagggctgatgggaaccggcagtgttcatgcccagttcgtcgtgcatgatcccggccacaccctgctgaactcaacggaatggatcgccaatgtcaagaaatgggttacacaaatcaatgaaatgatcgatgcccaggaactgcggctcggcctgcaaaagatcgaccagttgaaggaactcaaatcattgaaagagcttgccgacctgctggacgacgtagcctgcctgagcagcgactacagcttttacctgaacgtaggatcgaattaccactgcctgaaatttctcaactttcagcgtgtgaccgtcaatctgagcctgagtaccgacctgctgttcaaggtggccaccgtgaccagttacttctcgatgaactcggaagggcgcatgtcctttatcgagcaggtgaaggaatcggtggaaaaagccgccgaagagatgcgtgagtttaacgaatccgtgcgttccacggtcatttacaaatccatgaaggggcataaccggaagacctattaccagggacggttggccgctttcacacgacacaccaattaaagcgttatgaatcaagataattttctctggggacttcagatcacggacggtctgacgatggaactcgtttcgcaaatgacagtcatcgccttcggtgttggtgtcatctgctttatctgcaacctagcatacaactatctctatcacggagccagccagctgttaagcccgaatgaggacaaatttcccgacatgatggaaatcgcccgttgcctggtactgttcttctgcctaagcatatacacccccatcgcccaaaccatcgtaggcacgatggaagtaatcaacgaagccacctcgctgacctccgagcgtgcgcaggaatttgcccagttcatggcacaatcagccatcgaacaaggagagatgattgccgaatacgacaaacacagcctccagtcggaggtagcagccggagaagacagcaccggcgccatgcagcacgaactggataaaaagatggaagaggacgaaatgaccggtgtacgctccagcgtggagaagattgtgcagctgctcaaccccgccaacctcgccacccttgtgcttcatggcatttccgccctattggtaggaatcatacaagtagtcatcttgggtatcggcgtggtcattgtcaagctactggtcattctcggcccgtttgtctttgccgtaagcatgttgccggtctttcagaaacagttgagtatctggttcggtacgctctgctccgcctgtatggtattcaccgtcatcaatattctgaaccaaatcatatggcagaccttcaaggccatctatacggaaagtgccgacatggtggacgcagctacgcagcagatacaatatttaggaatggatctcgccctgattggtgcttattgcagctgtttctggctatcctccaaaatcgtaggacacagcgatgccgggaaaatcatttcgaaaaccgtgtcaatcgtcaccacggcggccaccatcgccctgatgggaggcgcagcggcaggcggcaagctgaccaacgtaggcggtgccgcctctatcggggcaagtttcataaacgacaacaataaaaaatagaactatgaatctgatgaaattcaaaggagcagatgatgcggtcaagctgactatccggctttcagccgggtactgcatcattctgactatcgcttttgccagcagtatcatcttccttatcaacaaaatagaaaaagcatacggccaggctctcgtcatcgacaggcagggagaagtctatgaggcaagcagcctgtctgccagcgatatgcggcaatacgaatacatgaaccatgtaaagaccttcgtaacccactggtatgcctttgacgagagcagctacgagaagaacatttcgcttgcgctcaacctcataggcaacaaggggaaggagctgttgaacgagtacaacgatgtgaatatgctgaactcactcatacaaaagaatatccgttacggggtacgcatcaaggatgtagagattaacacacaaacgatacccgtttccggaaagataatcttcacgcagaccgggtaccgggcacggggaagcatctcacgtaatatcgaagcggagttcaccatctatgatatgctgtcccgcagcgaggaaaatgcgcacggagccaagatagaagattggattgtccgctattccgaacccgtggaaagcaacggcaccaacacatcgcaggcagcttctccgggcaagaatgaaaaccagtcagaaacctctaaaccaaccgaccatggaaccgaataaacttatcaaagacaagaacaagctgttgatggccatcccggtaatcctgggcatcctcttcctttatgtattcttcatccgtgaggacgggaacgtgccgtcagggagtgacagacaggccgcctcgcaagcctttttggaaccacagtcggaaatggccgacaaggtgaacgacaagatggaagcctataagcaggacaaactggaagagcaggagaaggcacgcatcctgaaagagtctcaggtcaaaggatctgatttttacttcgagctgcaaaaccagcaggagcggtatgaccgtgccacactggagcgcatccgccgtatgcagaacgatccgtacagcgaagtcatggcagaatacggaggtggccggaacggacgcttctctcatcagctggaaagccaactggacggactggaggacgagcaggcgctcaacgagattatccgggaagccaagaagaactcacgcatccgcaaggaactggaagaatccgacaaataccgcaagcgcatgtatgaacggattgtcaattatgaccaagagggaaaaacggagaaagccgctgccaacccttccggccatccatccgccgacagcctgatgcaaaaaggcccgatctaccatgccgaaaacggcaagcgggtacgccgccaaccgacctccgcaccgggaaacagcaacctcttcagggcttgcatccacggcgaccagaccgtagtcacgggcagtacggtacggatgcggttgcttcaggacgtaaccctatccggcatgaagataccggccaacacgctgttttacggtatcgccactttgggagccaaccgcctcgatgtggtagtcagcaacctgaaggtaggagacaacctcaatcccgtatcggtggttgtcttcgacaatgatgccatggaaggtttgaacctgcccaataacctgaaagccagtgcagccaagcgtatggaacaaggtcttgtacagaacattgacatgccgctctcttccatcggcacgatggccagcgaagtgaccagcgtagtcaacgccaccacccaggtagccaagcaaatcttgaacatgagcctctcacaagtgaaggtacatctcaagtccaactacgaaatgtatatccaagaagagagtcaggaatcgaagttgcgtaggcaagccgtgcaagcggagttacagaagctctatgagcaaatggaacaagagaaaacgaacaagaaaaatcatccccttcaaacattgatagacaaattatgatagacattctcaattacctgcttgcgctgtcagcggtctttttcggctatcggatctacgtatcacgccggaacggacgagcctttaaagaaatccgtccgctgaccgtttctttcggcattaccctgcttcttctatggggcattaccgtattcaccgcctttttttcaagaaccgtttaacatatcgacaacatgaagaaatatatttatctactgttttactgctttgtgtgcagtctgccgctcttcgctcaggaaaacggcactccccggaaacaagccatcagccaaaaagacatctttatctctttcgactgtgtgaaacacctggtatttcctgtgcaagtatctgatatcgccatcggcgaacaggagcttgtcatggccagccgggtagaagaggcgccccatatcgtcaggctctcggcgcaagcggaaggattcaccgaagagaccaacctgaccgtagtctgcatcgacggaagcgtttacacctatcacatccgctaccttcccgaaggcggcacggattcgtacccgaacatttacgaggacaacgggaaatggcagcaccatgactatcaggcagaagtcagcgacctccatctggccgagttcttctttccggaggacatcgcttacggaacgcccggcaacgaggtgtccttcactctggccgcctacaacaaccagttgaaagtatcaaccgccaaagatgccgtggcatattccaacctgtttgtggtggataaggccatgaacacttaccacatcaccatcaaacggggcaatacctccgtattcacctacaattttgatgaccagcgcaaatataccgcccatgtggatgtgaacagcgaggaaatggaaagatgcatccaagagctgcgcaccaagaagcgcaacatctacagcctgggggtcatcgagaacaagtttgagttgtcaatggccaatctgtatgtgcatgaggacttcatgtttttcatctttgacctgaaaaacaaatcatacatcgactacgacatcgagtttgtcaaatgtttccagcgtgaccaaaagaagagcaagaacgccatccagcaagaaacgaccatcgaacctatctatcagaaagattttgatacgaaaatcaagggcaagagccggaaccggctgatacttggtttcgacaaattcacgatacccgatgataaggtattcgagatcgagatttacgagcgaaacggcgggcggcacatcaagctggccgtgttgaacgaatacatcctttccgcagaacccttatacaagccacagccatgaaactgagagaagcattagacacctatatgttcgacaacgtgggacagttcggcggcatcgccgaatcactgggctatcagaccgaataccgggacggatatttccggttccgcaaagacggggaagagctgagcatgagcgtaagcgaaatcagggaaaaagccggagcaaagtacgatgaaagccttcgtgaccaatcaaaagaacgtgtatccgccctttttgacaaggaacgtgccaatgatcctaaatatgtcgccgagctggagaaggatggcatcagcatcaagcggtgggagaacctgaagggacatgacaaggacggctttaccgtcatcgaccatcgcctgaaggtatgctacaccggacagtcgctctatgaatacgcctacaagcaagggaacatcctcgacgggaaaggcaccaagctggaaaagggtgtcatgtctgatttgatggagatacacggcaaaccggggaagctccgtttcaacgatgacggaatctccgtattctaccgcaaagaggcgttggttatcccggacaaggtgctgggaaagaagttgggcaagaaagagaaagaacagctgcttgccggtgacatcgtacccatcaccgtaaataagaaggacatcctgctgcaagttgaccgggatctgaactccgtcatcctgcgcaccaaccaggaaatcaagattcccgacatcatcgggcagaccagcgaatatggcggctacaagttaaccaaagccgacaaatacctgctcgccaacggccatgcactggagaacaagctgctgcacagtccggaaggctacttcattgccgacatccaactgacggatgacaggaaaggagtcatgatacagaacatacagagtatcactcccggcaaggcacaagagctgatcaaggccatgacccccaaactggaagcccatgcggccaacatagaagctgcaaaagagcaaaaacacgaagaggggcgcaatatggaagccgagtttaaggaagcggtgggcaaacatgactttgaaaaaatcgggaagctcaaagaggaaggatataaacccagtgaagagtttatcaaaggaatcggtaaggaacacggtctggatgaaaggcaaacccatgaagtcatccagctgttcggcaccaagccggaagaacagggcgaacatgaaaggcaggccgcacgtctgttggatgccgcacagaccgacaactttcatgtcatccaagagatacagaaagaagggtaccggctcactcaagaagaccttacccggatgcgtgaaacgggtgtgcaagccaacacactgatagccgtacaaaagattttcgggatggaaggcagcacaaagacactgggagatgtcaaactggccagcacacccaaacccgacaacagcaaggaaatggcccgtccgatagccagcaccatcaaccgggctttcaatgacttataacctaaaaaatcaggaattatggattacgatgaattagtacagaaaaacattgcaggagaaatcagtgacttagagtttctacttgcacaggaagagcttgcacaagcctatcaagaagagatggctgccaagcagcaagagacaaacaaccaaacggccagagaatggctgcttgattacgagaacagaaatctataccaataaatcatggatacagcaagtgataaagcattacagcgtttcgccgaactgatgatcgaaaagataaagcaggtggaagacaactggcaaaagccttggttcgggataaagggtgggggacttccgcaaaatatcgagggaagaacctacaacggagtaaattccttcatgttgtttctactttcggaaaaagagcagtacagcctgccggtctatatgaccttcatgcaagccaaagacaacggccttaacatactgaaaggagaaaagtcattcccagtcatttactggaatttctcagtaagagacaagaacggaaagaaaatacctttcgacgtatataagaacctggataaaaacgagcagcaggaatataaggtcacgccgtttctgaagacatacaatgtgttcaacgtacagcagaccaatcttcaggaaacgaaaccggagaaatgggaagcattgaaggagcaattcaagataccggccatcaaggacgagcaagggatgctcaccgtgcctctgattgatgcgatggtacgggaacagcaatggatctgccccatttattccaaggaaggaaatagtgcttaccatgcaaggggagaagataaccatatcgtcgtacccctgaaggggcagtttaaggacggagagaatttctactccacactactgcatgagatggcgcactcgactggagaacctgagcatctgaaccgggaaaaaggcgtgattttcggagacaagcaatatgccaaagaggaactggttgccgaactcacctccgctaccgtcgggcaaagcctgggaatatccacccatatccgggaagaaaatgccatgtatctaaaaaactggctgggagccttgaaagaagatcccaaattcatctacaacatccttgccgatgtaggaaaagccagcaatatgattcaggaacataccgcacggatggaacagtacctcacaccggaggaacggttcacgcaggccgtcctgcaagacaaccgtccggtattggagcagatgaaaaacgaaggttttaccccttcatcacggttattggaaagtgttgcggcaaaccatcctacagccgacaaccttgaaacgctacacagcactttcggcatttcgctgccttccatggaagcggagccagccatgaaaaatatgaatgagccacagctcggattataaacttttaaaaaccatcattatgtttacaggacaaattatcggttatgtcggtgcggatgcccggcagaacaagaacggaaaaggattcaacttccatgtatccaccaagtacaagaacgtgaacaacgaggaacagaccctatgggtatgctgtttcgtgaattacgagagtaaagtctttgagtatctgaaaaaagggacacaggtatatgtctgcggcgatgtgtatgccgatgtattccagaaggatgacggtagccacatcccatccgtcagcctgaccgtctcacgcattgagttactgggaaaggcagagaaaaaagagagcggtgacggaacggcatccggacaaccccaataacagcaacggccatggaaagagagaagaaagacctgtcattcatcctgatcctgctatccacgctcatcgggacagccgtactgtttcagtgggctatcgttacgggattatacgctccactacgtaatccggccatgtgggaaaggctgatggagaaggatatcctattccggtttctctacgttatcctgatcggaggcctcgcttttctctttccggttggcaaagtgaaagacgaaaacaagaaatgggtttacaccagtatgacactggttacggcatccatgctggttgtcggattcagccggttatcagcgtggtataacctatttgtatttcccattctattcgtagcgtacacgctgcttgtcatcaagactctgccttatttcatccggcgtcatgcccaatccgatgatagcattttcgggttaagccgggaagaatcggctttctacttccgctttgaaaccgcctccgggccgctggtcatccataagccgcagcagaatgtctatatcgacggcggtccgggaagcggtaaatcagagagctggatcaagggaatcatctaccagtgcgccgagcgcaactatgccggattcgtgtacgattgggagggtgatcccaccaaggacaagtcacccatcctctcacgtatcgcatacggaagcatcgaacatttccggaacaaggggatggaaacaccccgtttcgcctatatcaactttgtggatatgtcacgcacggtcagggtgaacgtactttctccgcaatacatgtcaaagggaaacgaatcgctattcatccgcaatatcatcatgacactgatgaagaatctggaagcaagctggaaggaaaagaccgacttttgggccaacaatgccatcaactacgtctattcaatcgcctataaatgtttcaaggaaaggaagcttggtatctgtacgctgccccatgtgatagcccttgccctttctgacagcaacctagtattccactggctgtcggaagatcctgaaatcgcattgaacatgtcctccatgctgaccgcctggaaactgggtgcacaacagcagacagccggagccgtatcatccgcacagactccgttggtactcctgaacaacaaatacatcttctgggtgttgtcgccacttcccgaagaagagttctctttggatataaccaacaaggaacacccaacgctgttatgcgtaggcaatgcgcccaccatcaaggaagccgtttcccctgctatttcctgcatcggcagcgtcttgatgtcacagatgaacaatcccggcaaagcgaccagcatattcatggtagatgaatttccgaccatcctgttgcaaggcattgacactttcatcggaaccgcccggaagcacaatgtcgctaccattctcgccgttcaggacttcaaccaagcggtcagggactatggagagaaaagtgccaacatcctgaaagcctcctgcggaacgcaggcttacggtatgaccggaaatgagaagaccgccaaagacatcgagaacttgcttggggagaagaaagaagcgcaagaatcttattcacaccaagccggtggcaataacagtgtcacggagagcctgcaaaaagaaaaagtcttaaaggcaagggacattgccggacaagcagccggacacttcattggcaagattgccggaggcaagccgccattcttcagcgtgcagatggatatgtgccgttttgaagagaaggagataccccgtttctccttaccggtcaaactgggcaacggcaaagaagagatggaactggaaatcctggaagagattatccagcagaactacatcaaaatcattgaagatgtcaacgccatcctcaaaaagatagaggacaaattaaaagaaaagtcagcagttccgccaaccgggacacacaagacagaacaaaaaatcatccgataacattcaacaaaagaatcctaccatgagaaaaattcattcattattagcggcagcctgcttattggccgcttcatgcaacaaagaggaaatccaatcggaaacagacaaagccggcatgtatcacatcaccgtagccgtaaccggttcctcacccaaaggcagtgtgcatatatataatcttgacggcgtgagattcaggaacgaacgcaccggtacctccgcagcttccgtagatgagagtttcaccgataaagcggaatacagcacggaaaagcctgtcagccaaattaccgtgcaaggcattctctattcaaaagagagtgctatcatcaccatgcagataaaaaaagacggggaaagcgtattcaaccagagcaaacagttggaggccgttcccggtatagacactactgttgatttggtttacagtaccttgaaataaaaatgcagacgaatcaaaaaacatatactttctcttccatatttagatgatatttcttatctttatgaaagataatctttctcatttataatctaagctcagataaaatgagattcaactaatccagtcaacgttatgaaagtcgatttcaatcagataaaaacaaccatttctctgcccgatttcctgctggaactaggatggaaaatcgtggaaggctcttccaactcctgtcccaaaatgagcaacggaacgcataccatcgtcatcaagcggaactcgcagaaccaatacacctattgggacgtgcatagtgacagcgtgcgtggccgcagtatcatggatctgatgcaggaacatctatttgaaacaaccggaaaaatgccgtccttgcgcgaggtgggggagatccttcagaactacatcaacaccaaccgcatcacgacacccgaaaaaagccggtatgaagtaggtaacacaagcatgagagcggacgaacttcaattctacttgagccagctacaaccctacaagggcaattatctccagaaaagaggtatcctgaaagaaagcattgaaagccggttcttcaaagacactttctttatccgtgaggtaaagaacaaagggagtgtttaccgcaacgtgtgcatcaagatgtacaatgaaaacggtgtgcaagccatttctcaacgaaatgaaacattcaaagggattatcggtggcaagttcgactgtctggcgaccagcaaccatgacaaaagccgcccgatagacattctctacattggggagtcatttatagactgtatctcccactatcaattacgccattccggaaacgacctcaatcttgtatatgtatctacggaagggacattcacggaaggacaaatgaggctattacgcctgattcttgacaagaaccaggtaaaggagctccggagcatctttgacaacgacaaacaagggcacaagtacactctatggctgcatcgttactttcatggcgatacgactgatgtcgagagcctgagtaacgatgaactccgcaacaaggtacggaaactgaagaacgtcgaactttcggaaaacaaggattggaacgatgatctgaaaatctcgtgtggcatctgttcctccacggaggacggccagtaacctcatagatttgctccatcacataatacgacaacctataaaatcagatcaatatgaatatcaagcatttatttttttgtatgctgctcattgccttttcctcatgcagcaaacccggctatgagaaggccattgcggaatgggttcagacagattctcacggcacctggacggatttaaagttcgaactactggaagtgttggaaacagaagacgtcaccgtatcggacagcctgtgctacctgaacaacaaaagcgcacaattatccgctgtcatacagaaagcggaaagtccccgtgccttattcaaaccgtccttttccgcctatatggaagccgaaaaaagcctgaaagcaacggatgccatgaaagccatgtacctgcaccgtgacagtacggaagttatcggcaagatattaaaatgcaggtatgccatcgtccagccacactcaggggtgcagcagaaaaagacggcttctttcctattgtcccccgacatggaaaaatgtatcggcaaactaaagccgacaagcaaataatccgagcgtaacgatgtgtagcgacaacgttttttggggttcttttttgggcgtcttccaaaaaagaactcccacacatttagatgtgtgggctattcattacactaccatcctttcccttatcaacggtatattatcccgtaccaaattcagaatccggtcatgataggctgataattggttagactttccacgacactggcacacctccatcctgctaagtgaaaactccaccgtttccatgcgccttccatccaccgttgccgacattatcaacgaatcttctctcttataataggcgttgctgaatacacaatgatgcagcaactttccctctttgtaaaagtccgaaaggctttccaatacccgaaccataatatttccatccgcaaacgaaagattaaagaaacgtgatttggcagcaatatagtctttttcatccttttcagaatattttttcttacatttccccatcacccaatcatgcgcttcttctacattcaacggacacaaataatgaggatttctcgcatccaatttattttctatcagcatatccacatagtccagccacaagtccgcatcatgtatcacatagtcatgtcttaaacagatttttacatacgtccaatacttatctataccgtattttctctctaaaaatctcaagaacaaattcatttgccctgccttatataatatctccatccgattatcagttaataatgtcataaagaaggaactcggacaaatatcataaaaggcacccttaaatccattcctcgtaagttcgggtatcactttcattctcggatagataactgccgggcaaatatcataaatacggtcatgatgcacattccgcttacgcaattccaaagaacttccatatatccatgcatcgtaataaaatatagacatgccccgcagcaaagacagcgtttctgtcttgccctctttattcatccaacactgtaccgcctcaattataaagtaattagccggagacccttttttcagccggcagtccaccataaaaaaacggataacttgatattgcttgtatgtagtaatcacacaaaaatattctttatatacagccgtccttttcctgctattctccaatttcaggttcataccgcaatgaggacatttacagtttttcttatcttccttatcccgccatgtatgcccacaatccaaacaaaagcaattcccctttgcatcacgcttgaaataatgcacaaagcaatgtttataggcataacgcttttgagcctctgaaacgggagctaacttcctgctcccattcacgatttccatttgtaattttgtcttgggtttcatatcaaaaaagagttaactgggtttgtacttcggtgttgttctcacgtttagcttgttgacgcttcttcaactttgccaattcttcctcctgcaattttttgatagcagcctcacgagccgctttcttttcttcctctgacaattcaacatgatgatttacgactacattacatttcaatgggctacccacctcaatattatcttcctgataatagtgcaacgccataccaaaaatttcatcatcactaaaaccacagcaaccgcttttcttcacttggtttaaaatataggtaatgcaattatctatattctttgtaggtttttgatagactggagcaaacagactatccaccgctgccatattatcaaggtatgccttgatggtacttttaaattgttctgacactttcatagtatatcatttttagatttcatttcacaataagccaatttcacgagaaacaaggagaataggcaaataagagccaacaacgtaaccgacacaacctttatcggacttggcgttattaccgctccgacaaacatagccactgcacaaagagcgatgatgaccgaaaaaacaaattgaatgatttgcatatacttctgctacttagtttgttaaacttctaattttatgcttcagctagatttaaagacctttttttaaaacccctttccgggatggccttttctttctgccgactttttttttgagctttcatgccccatctgagtttatgagccttttttttacggcacacaacaataaggaaggagggattaagaaaagttttggacgacaaaaaatgttggggacagcgaagccgtccggcgttatttttttcgggacaaaggggcgaagaccggaactctttcgtatccatccaccgaaataaatttgccgttcaaaaacaaaggatctcagatggagctatgaaaaaagcacattaggggaggcagaaaacaaggaaaagggcagtacggaaagtaaaacaaaccatacggttttgcttgcaaaaccgtattcctatctccctgccacaagtgacaggggggggaacgggttagcaacggactgccgggacaaacggtaaaaggaaggaactgcaatacggaagaaggaggttgtttcggcaatgccgaagctccggatgatgaccattgcaatcccgcccacgtttggaacttctcttttctggtttgcccataatcagccgcatagcggatgactacgggcaaaccgggaatgagaacagtcattccgatgaaggggagggtggggaagaatactgcgtgaacgcaaaaacactctcggatatgtagcaaaaaaagcggcactaggccgcttcaatcatttgcttgcttttttctttttagagacagccttctgtttaggctgatccggtttttcttcttctttttccggagccggataaaacttggtggctaccatcacaatgcggttacgcttctccccacttttagaatccgtccattcttccggcttaaagtagccttcaacggttatcagctcaccttttttcaatacatcgaaggaatccagtgcttcattctttctccaggcttcaatccccatgaaagcggaaacataagaggtttcttcacctgtcttgtctgcacggctgaccgcgatagaaaagcgtgctacgcttgctgtttcaaaactacggatttctgcatccttaccgataaaacctgttactgcgaatgaattttcaatctttttcatatctctgattttttagaagttaattaatcaattttacagtgcaataactgattgttggctttgggggacaccatgaaaaaagatataaatactctttttatgctggccggaaaaaggaagatttgtaacttttttattggtgaagatggcagcaaataattcgggttaaatacgctttttatgcaaggcaaaaaaaggaagatttcagacgaataacaacgtggtgtttgtgaatcgtccccttatccccgtaaaaggggttagcaacaatctatatttgcaacggaaaatgatttgacttccctaaaaaatgatatgaaaaagacaaaacttgaaaatcagcaacaggtttggaaaggatgcaaaaaacaaccggtcagacagcaagcatggcacattccgaaaatatggtcagccgcctatcgacacaccggaagaaacctctgcaattccttttaaaaaaatgaagccgaagaatgaagcatacaatattccacgtatcgaaaaaagtgactgcacgataaaatgaaaggctgcaacggaagaacagacttgcggattctgcggggagaacataaccatacaggcatacagccactacaactgtttccggaaaaagaagattatacaaccggaaaaacagaaaggcatccactcggagaaaagcaagcaaacgattgaagcggactgccgatttagcggcgaaatatccgactacctatatacagccctaaaaggctggggcatatgggtaagcaacagactgccgggcaaataaaaggagagtggcatagccgccggaaagaggttgtctcgatgtggccgaagctccgaaagcagaccggatatgcctctctcctttgccttccccattcctggatttcacacaatcacggagcctgcgagtgactatgagaaatcctgaaacggggacagtcactccgctgaaagggtgggtgggaaacatgtgactttctccaaaataacaaataggggtataaagatctcaaaagaaaagaaagccgttccagaaaagactggagcaactatcaccatctactgttctttaagttaattgcagcaaatccaaatcatcagtgaccaatccatccaatacatgttggattttatcaaatatagccttatctatgccatacgtggcgcataacgattgaaatttgcttacagcatcgaacacctgtaatatcttcttttcgggctcctctacaaaatcctcggcaaagttgacgaaatcacttgtagtcaaggcagaccttttgcccatcacgcccatcgaatgaatgtgtgctgaagaattttcccatgtatttgccgtgaacattacatcatatgcaggtgataaacgccatacccctgccttatccatgataaacgatatgttcttattatgatcatcggatatacctgcgacataattaaataccattctgataaatatctgatctttgtcttcctggggaagtttcagagtctctgctatccaacacagcttcatataatcatctgcacccggcataatggccgcaagggtctgactaaagagcttttctccattcttacgatcaaatctttccgttacgaaatgatttcttccatcaatttctttcaggaagcatggcatcatgttgattcccgccgcctttgccatttcgctatataccatttctatctctgtggtaggagagtcatctgcttctttaaatttgatgatatactgcttaaaattttcaggcaaatccacctggccggaacgaaactcttccgtttcgagattataggcaatcactgccttcgggcgcatgccaccggcagaagttccaagatatatcaactttttcatcgtgaggctatcctccggtgatatgacagcagcatctcgatcattatatattttagaagccaaagttgccaatgatgacatatttactgactcatggatggcatcatcattaaattccggttcaaattccaatgctcccatagccctcttgccaatataagagagcttcaatagaggcaatgattccgtaacctttatattattatccgtgagccattggtcaaatagggaagccccccatttgtcaggaagcgcatctgcaagaaattccggaagcccttgatataatttatctttattcccatagaaagacgcaaacaaaggggttctcttagggtgtgtggaagggcatatatcataatcttgtttcctatattcatccgtaaattggaatacagaacaatgcttttcaaagtcccaattcaatttgccaatgcaagtcccccacagatatacattcactataatcggctctttcttcataccatcttacgtttaccgttaattctttgtattcttttacctgttttttcattgattaggaaaggggagtctggaagttccggaaccaaaccgacaacgccttcaagagttccacttatacgcaaaatcttaagcaatgtacttagggcaatatcacttactttacaagattctattctcttaatagtaacgatagatactcctgccttatccgcaaattcttgctgggaaaaacagcagctaagtcttatagacttaactctcttgcagatttcctttacaatacattcatctgaaaattcgtatattgtatatgtatcatataatcttttcatagaaaaacatatttaggtatcatttttgatacaaaaataccgataaatctgaaaatcaccaaattaagaaacactttttttataatcttctgccgcattagcaaacgattgaagcgaccttgtgccgcttcaatcgtttgattgctttttctttttagtccgggggttcttatttttccggagtcgggtagaacttagtagctaccatcacaatgcggttacgtttctccccacttttagaatccgtccattcttccggcttaaagtagccttcaacggtaatcagtacatctttttgcagtatccaaaaagcatagcggtcttccatcttactctaggcttcaactttcataacagaggaaacaaatgttttttcttcatttatcttgcctatgcgactgaccacaatagagaagtgtgcaacctttactatttcgaataaatggatttctgcatccctacaaatcctgcctgttactgcgaatgaattttcaatctttttcatatctctgattttttagaagttaattaatcaattttacagtgcaataactgattgttggctttgggggacaccatgaaaaaagatataaatactctttttatgctggccggaaaaaggaagatttgtaacttttttattggtgaagatggcaacgaataattcgggttaaatacgctttttgtgcaaggcaaaaaaaggaagatttcagacgaataacaacgtggtgtttgtgaatcgtccccttatccccgtaaaaggggttagcaacaatctatatttgcaacggaaaatgatttgacttccctaaaaaatgatatgaaaaagacaaaacttgaaaatcagtaacaggtttggaaaggatgcaaaaaacaaccggttagacagcaagcatggcacatcccgaaaagatggtcagccgcctatcgacacaccggaagaaacatctgcaattccttttaaaaaaatgaagccgaagaatgaagcatatcatattccacgtatcgaaaaaagtgactgcacgataaaatgaaaagctgcaacggaagaactgacttgcggattctgcgggagaacataaccacacaggcatacagccactacacctgtttccaataaaagaagattacaccaccggaaaagcagaaaggctccactcggagaaaagcaagcaaacgattgaagcggactgccgatttggcagcgaaatatccaactacctatctacagccctaaaaggctaggacatatgggtaagcaacagactgccgggcagtcactccgctgaaagggtgggtgggaaaaaactaagtggacgcaaaaaacaaccttaccattgggggataaacttccccctattttcacttcacatattctttaccccacttcaattgattcaacaaacttcaacaacaaagcgactgttaccgtatgaaatgaaagctgattgaacaacttatgcgctttcagcatctcaatagcggcttcagccgtaacaactctctgttcataaagccgaattgtcgcatataactggtcatttgcgacaggccccattattaggtcatagtcaccgttttctcttcctctgcggttgttgacaacaaactccagccattcttttgtcgcacccataaaccgaagaaccggatattccctatcaagaatatcatcgggaacttcataaacagagacgattgctttttcgctctgttccctgttcttcttcaacaaagcccatttttttgcttgttcaaagttggttgtcgtataaaatcccttcccaaagtccgtagccttccgtcctttctgtatattagggcgtttcacggtaactgtagatccatgaaatagtctcattttcttttattgatataagtcgttatagtatctaatatatattcggggtcttgggtatgaagcatttcaaaagtctcatccaaaaaatcaaaaaccccatagtccgaaaacaacaacaaggtttcttccgcactttgtttcttttcctccctataattctcaatgcagaacatcttgaaaagcaggatcttcgtgtcaccgttataccgtcgtttttcttctgttttttccttctccaatgtttcataaagcgacaatgtacttgaataccataacttggtactcttatccagcaaagatttatacaacttggaagaatatatataatacagtgcatcgcctaaaggcaatgcctttttcttcatgaccagttctaccagctctctcatcacgaatgggagcatggttgagtcaagttctccttgatttttatgagtaatttccatattcttgttgttattactttagcatattttcgaaaacaccttcttcacagttctttatacacacctgacactcggccaccacttctcttaatattcgggcacattcttcattcgaatgcccttgcagtaattcataggcatatcgcatcagttcattagcttccattgtttccatccttatcaataatattcaagttcatcattattttctgcaacgactccatatttggagttcctaaccaacacacacctatgcaaaaggtcatattgttctctgtatctgaaaaacgcatattgttttaccttttacaaacattgttgtcccattaaaatctaaaagagttctttgaaatatttgaaatttagttagttacagcgattttccgagcgaacggacttgaatttgtagctttgcatcagattaatccgatggcatatgttccaagacaaatacgttttcgctcaattggcttcatttctgaatcgaagtaagtttaaccgcatagtcaccaagtatgatggtgataaatatgtgaagcacttcacctgctggaatcaactacttgctttgatgtttggtcaactttctaatcgtgaaagtctgcgagatttgatagttgctcttgaagctcatcattccaaatgttatcatttaggaatgggtaaaaatgtatcaaagtcatcgctggcaagagcaaatcaagatagagactatcacatctttgaagaatatgcttactacctggttagcgaagcacgacaaaagtgtgctaatcatattttcaaacttggcggtaacgtttatgctttcgattcgactactattgacctgtgcctttcagtcttttggtgggcaaaattccgcaaaaagaaaggtggtatcaaagtgcatacattatatgatgtggaaacacagattcctgcattctttcatatcacggaagcatccgtacacgattctaaagttatgattgaaattccttatgaaccaagctcttattacatctttgaccgcggttataacaacttcaaaatactgtataaaattcatcaaattgaagcctactttgttgtcagagcaaaaaagaatctcgggtacaaatccatccaatggaaacgtaggctgcctaagaatgtgctttcagacgcaagtgtatttctgacaggattctatcctaaacaatattatccagagccacttagattggttaaatattgggatgaagaacaagaacgagaatttacattcataaccaatgcgatgcatatatctgcgcttcaagttgctgaactttataaaaatcgctggcaggtagagctgtttttcaaatggctcaagcagcaccttaaaatcaaaagattttggggaactacagagaatgctgttcgaatacagatatatgctgctatatgcgcttactgtttggtggcaatcattcaacacgatatgcaactgaacagaagtacatatgaagtgttacaaatactgagcatctcattgactgataagactcatctgagagacctctttgataaaactaaatttcaaaatgacaaagaacgattcggaccaaatgggccaagtttatttaatttttaattcgtcccaattttaatgggacactaatgttttacaaaggtaaaacaattaagtaaaattcatctatcattgcttttcatatttattgtgtctttctcttttgcatcggaagtattagcacttacagcaaccagacagtatgacatcgccacgtttgatcataccgctggaaaacaacgatatacaatctgaatcaaaacagattgtatatcaccaatttctttttttgtgccttgttaaacgtataagaagttcctccggcagattttccatcccaataggcaatcagcctacaggcgtgtgaaatcatgtaatcattacggtgggcatagcattgggcataataatattcggatagaactaccaccttgtcggcttggcgcaaaatatcagcatacctctgtttgtcctctttgttgaaatacacatcttgcccgacataaggaacaaccgccaccaaaaccatatcgggatattgtttcctttgttcaagtacggtatgagcagccatcatgtcaaatccaaccgcacaaccaatatagaaaaaacggattccattctcatagcagaaacgtacctcttcattcaacgatacggacaaagcatatttatttgttcgtatcgttctatgaccggtaaaagcaacggacatcattttcatccatttatcacgtgcctttctacatatatccaacgaacctgccgaagtttcatacaccattccattcacctcataacgataagtgaaccaagtagtatctccaaagatatccttctgcttctctatataactctctttttctttcatcttataacatacggacaactgttttacctaaaaagaaacctcccaaaacctcacctcctattttttccaactgacatgcgaaacgagcatacgaaaacccttttgttaaaatatcgtcaaataccaagattttcttaccccgaaaaaagtccttgtcaaattctatcacttgtactttttgaagcgacttgctgtcaaatttctcgtgaatagccaaacgatctccactgacacgtatatgttcatacgcattgatagcacctgaaaacttacacacagccgaagcaaaccccttataacgaagttcattcttatcagcggaagaagccggaacacaagcaaaaacaatattcttaacatcatcaccaaaaacttgatgtaacttattcgctatcatccaagctatattcaaataagcttttccatccttaaaactccatatcatcttacgaatttgccattctctttccgttgcctgccgatattgcataggaagatactcaaagaaagaaaacatcatcttatgccattgtctgtctaaactaggatatttactctgatgtgccatagtcttttatctattaaaattaaacttatgcttcagctagatttaaagacctttttttaaacccctttccgggatggccttttctttctgccgactttttttttgagctttcatgccccatctgagtttatgagccttttttttacggcacgcatcaataaggaaggagggattaagaaaagttttggacgacaaaaaatgttggggacagcgaagccgtccggcgttatttttttcgggacaaagggcgaagaccggaactctttcgtatccatccaccgaaataaatttgccgttcaaaaacaaaggatctcagatggagctatgaaaaaagcacattaggggaggcagaaaacaaggaaaagggcagtacggaaagtaaaacaagccatacggttttgcaagcaaaaccatactcctatctccctgccacaagtgacaggggggaacgggttagcaacggactgccgggacaaacggtaaaaggaagggactgcaatacggaagaaggaggttgtttcggcaatgccgaagctccggatgatgaccattgcaatcccgcccacgtttggaacttctcttttccggtttacccataatcagccgcatagcggatgattacgggtaaaccgggaatgagaacagtcattccgatgaaggggagggtgggaaagaatactgcgtgaacgcaaattaatgggattaccagtaactccaagcgttttttgctacttttttggggtgcttgccaaaaagtagcggacagcaaaataccctcccttccctaatccaaaagaagggagaatgtgcttcattgaaggtatataggttccgttccctgattataacaatacatagtgttatttctgaaaccatcaaagcatatatgaaaatcatcgaaatcctgttccgtggccaaacgaaccttatcactcaacaaaaccatgcattgtttattgacagatgtagccaaagaggtagtacgtcccggctttatctccaatgccaccacataagaagtccttcgtggatagatatacccaataatttcctcattgagtacaaccaaacgaataacatcttcattcaaaacgggaatattattaattttgcccatcattgttataatataaatcagtttataatcattaaaatacaatatcattacaaatgatacctataatttttataggtaaacttttccaccgagaccacctcataaagatagtcttcatggcaagaagccattatacagttctcacattcaagaataggatttataactacacggaatttaatagtgccgtccaccagaacaaactccacccgattaaagaacccttgtagagaatgcccttccttatccatcagacgcactacttcacctgtaaaaacagccaattccttagcctgccatttcgctttacgcaaacaactgttcgccgctttgacgttctcattcacctcttttgttcttattgctttcataccaaaatcctttttacatatttatcttgtcaaaaatcaaaagtcagctgcgtagcccttgcgttgctctgaatcgacctcttcaattcagaattatcctccattgcattttcaagtttcctaataaaagaagtgtcacctgcttccgttatctttaaaataggcaaccatactccggctatcagctgtaaatctatatgataacttctccaatgctgcattgtcaatgtattcatccatgcgacttcaccgggtacgctattcatcatcagattgacaacggtcatctttacacaaatcaaatctatatccgagccataacaaaaaagccttcctccatcattctcttccgcacatttttttacagcggaaagtagcatcctgccggaaccacagcacgaatcacagaccgactgtttaggtttcagcctatttccccccatacatgccatcaaatcagcaacgtgtatcggggtaaagaactgtccgttattcccatgactgacacactccatgaacatatctcccaagacatcgcaaaatccttccgaatattcagacaccctataaaacatttgaacaaaaagttccatttcatatggcttatatcttttttccactctacgataatcctccgccaacatcccgacagacaaatagtaaagacaaacatccaaaaaatcccgaaaggcttcttcatatccccgactgaaagcaagcttttcataaagtttcattatctcctttggtatcatacttttctgacttcattattcacaacattctatattccttgtgccatagattttatcaaaagccgcttttatctccgagcgatatttacagtccttctcaaaacaaagttgttttgtccaaaaatcgaaatcaaaaccatcggtattatcaatcgttacagaaacataatcagtcataccactctgacatacaaccgtatgccgatttacacaaaagtggtcatttaaagcagtttcttttcgggtaatgcgttctaccatcttatctatccacttcatacttataatattttatgtaattgccccattccaagaggcagttacggttatactcattaaaaatcgttctcgttcaaaaacagcacatcgcctttcatcaccatccaattaatctcactcagatgatagccacaatgcccactcaaaaaaatctcaatctcttcagtggtctgcaatctcctgtctgggcttatcaccgcaacattaccggaattacaatccaatacagccagtttctcataagcccactcaccaaactggcagaactcgataaaattggtataggttatccgtatgctattgtttgcatcaaattcaaggggtgactttgtaatgaatgaacctgcatgattcaccaccacagaggggctaatctctgccaatgaagataagctgtcatcccatctaatctcataaaggaaaaatccttttggcaatgaattgcggtctatacgataactggaaaaaagaccgtctatcgtttcattaataactaactgttcataatctccttctaaatagtgtactcgtgacataactcgttgttttttgggattgttaaacttctaattttatgcttcagctagatttaaagacctttttttaaaacccctttccgggatggccttttctttctgccgactttttttttgagctttcatgccccatctgagtttatgagccttttttttacggcacacaacaataaggaaggagggattaagaaaagttttggacgacaaaaaatgttggggacagcgaagccgtccggcgttatttttttcgggacaaagggcgaagaccggaactctttcgtatccatccaccgaaataaatttgccgttcaaaaacaaagggtctcagatggggctatgaaaaacgcacattaagggaggcagaaaactaggaaaagggcagtacggaaagtaaaacaagccatacggttttgcctgcaaaaccgtattcctatctccctgccacaagtggcaggggggaacgggttagcaacggactgccgggacaaacggtaaaaggacggggctgcaatacggaagaaggaggttgtttcggcaatgccgaagctccggatgatgaccattgcaatcccgcccacgtttggaacttctcttttctggtttgcccataatcagccgcatagcggatgactacgggtaaaccggaaatgagaacagtcattccgatgaaggggagggtgggaaagaatactacgtgaacgcaaaaacacagtatgtcatcttaaaacaatatctttaacctcaaatccgcaactacgcgcctaatatgatacagaagcgaaaagaatctgcatcgttagtaaaaagggggcacagtgcatcgaatgtcaccataaagacatataaatgccccttaccccaccatgcgacttgaggcaatacgcaaaatcacgactataagttgtcggtgttatccaaagtcattctggaacacattggcataagcattgttgcatgaatagatattcagcacatacttccttgatgtcctgacccatttggctggcacagagatgaacttaaagacaaacgtcttgatgcggcttgttgctttgagtccgaacctcttcacgtcaagcctcgccatgatgaatttatagaagttgcgtatgagtgccataagcagaagaaacaccgtgttttctcccataaaggattttggaagcctgttccagccgaatccgttattcatatcatcgaagatgcgttccttccctccacggaggttatagaattcgacaatctctttctcggaagactcgtagtcatttgtaaggatgcagcggtaggtgtattctccttcccacaggtcgagttcgccgtctatccgcttctgtctttgaatcacaagacggtatgccttccctttccatttctcgatgagaatggaggccagctcaaactcaatgccgcccaattccactttcttccaacctctgagggcaaagatgtcattgtagagcgaactgcatcggttagcacggatatagaaggtcttgcagtgtttagcaatctcttccactatctcttcagaacacgagccgcaatcagctctgaaacggttgataataagcttgttttgttcaaacctttcaaagaacctcttcagcgtgtccttctggtggaaacggacatttgtgttgccgtcgctgttctcaatgccgacaatcaagttgccaataaccgccacgccagggcgataaccaaggaacttcttgtatgtaggcttcgcatcaaacttctcagcctctatgaactggtggtcgaagtcaacgtcatacccctcgccctctttcagctgccctgtggacaataggcaattgaggagcagtgtattcagcttgtctgccgtgttgaagtcgtaggtcttgccagtgtcggatgtgtaggaaatgttatcctgggtcagttcctttatggctctaagaatcgtgtcggcactgcatgtgcgaagtgtcggatgaagcgaaaggtggtacatcagatgagtggtgacatcctcgatgcatgagccgccacaaaaataaacgctcataagcgaacggatgatttcgctgtattgataaccatacagcctgcatctcataccgagggttgagtcgattacagatgagagtctggagtcaaattgctccattattgaaaatattcctccaaaaggagtgagtttctcggatttaattgctacctttgccatgtctgtcgggtttgatacatattttgatttgcaacactaagataggtgaaaaatctgacatggcaaattcctgagcaactttttgttgctcaggtacttaaaaagttatatttgtaatagtgttgcggaattaaggtttaaaaagtttttcagaagaaatgcttaccaatatcctaataattattacttttgataacataatacaacgatatggaaaagaaaaagattacaatagaggtagaaccagctacagccgtagctaccgtcggtttattgcgtgggatatttcccagtatcatcgaacaactggaaaggcaagccgcaacaaacggcagccccttaaaattcaataaagtagaaaatatgcaagaagtattggatgagatttatgaaaagtgcattgccgaaacgaacctccgggagtttgcccaggcgcacttaaatagtgacggattacctaactgatacagaaatacggaatctgccagccatccttattccaaataacaaatggtacagaattacacacctgtcatgtgggatgacaaagcatttgcctttgtcccctacgaagcattcagtgatttgccacattatcccaaagaaaaatgtgagcaaatttgcaaagagctgaacagccttataagactatgtacttataggccgaaaaaggaagatatttattttcatccggtaagttatgtacgtcgttccggaggtttcatagttacggataatcaggcatcctttgagaaatgcccctatcctgcttgcgcagaccgtcatagctgccaaaaaatatgtgatttgatgaaccgtatcattgaagagtcttaattatataaaataccatggaacatccaaactccaaatgcagaatagcacaagctgaatatttaagtcggctacctgaagaagaacgggaaaataaggccagagatattagaatcggaaacgccagctatatttaccaccaacaagcggttccaatccaagaaaacagattgataatgtattataaagagtggttggaaggtcttcctcccaacatttcacgccatatgagaatgcttggatttgaagcatgtaagacaatgattccgtttacgagatatgtgaacgaaagaaacgatattggtatgcgtgactggatgcaagagcatctttcaccgagtgacttcaactattggcaggaactttcgaaaaaagcaggttcgccaacattttaatcccatcccgttcaatacgctgcctgaagaataaaaggtgcgtattaaacgagaatattttttagcgtttagtcatctcttcccgcaccagttccgtttctgtcggggagagtttcggcaatttgacagttgccggactttctaactggtaagccttcacctcattgataagcagctgccagtcaaaaagaaattcttcggaacaaccatgtttacgataaatttcttttgctgcttccaaaatctcaggagcgcaaaaatcgtctccctgaaagacaactgccggacgatcattattgatacagtctctcaataatcgtaactgatctttcattgtgtttacctattatgcgttctgttgttttaccattttcaaaaattcgtcagacggtttaaatgccggtatgttatgagccggaataatcatagtagtattcttagagatattccgagctgtcttttgcgctctcttcttcactatgaaactaccgaatccacgaagatagacattttcctccttacccaacgaagtctttacctcgttcatgaatccttccaaaacagcaagcaccgctttgccgtcgatgccggttctggcagatatttcctttacgatttccgatttagtcatttctttataatttgaaaattagcgtgcaaagataattaatccaatggattatttaaagtctggcatccgcagcaagccctgccttcgcccaatgaagtgttaaattgttgcgtatgggtcaagttccttaatccgcttacacaaataatcaaagcgtttcttggtaagcggtgtgagtgtatcgaggttcttgccatcgaaattctctccgaaaataaggtcgtccactcctatgccgtgattgtaattctcgcgcacgcaatcacgcagaatccaaaggttatgcaggttcacccagtcggctgtaatgtttctgattttactgaacagcagcgcagcagtgtaaaggtagtgtccgcaatggttgtagtcatgcaacaccagcttgccctggtaatagatgtcgaaatccttgttttcttcatcttcctttgtatcgcagtagaagaatggaatgtctttcagaccgtcccaattaatataagtagttggcttcataatatcttttttgaatacgctacataacctgttatttgcacactttccattattcacagaacatttgatgaaacacttccttcagtctttttatctcactgaaattcaaatctccaatctttcttttcagccggcttttgtccaccgtgcgaatctgatccgtggctatctccccatcacgcccggctacagaacacagaacccggtaaggatagttccttatggtggaggttatcggagcaatgactactattgtaaggtacatattcaaatctgaaggagttacaacaacacatggccgtgtctttgccatttcacccccacgggtagggtctaactctacccaatacactccatactgttctaccatgtccaatcctcaaacttttcatcctcaaacacatcagggataagcaactcatcatccccattctcatgggcacgtttggcagcttccgcccatccctgccgtggttgtgcctttatcacaatattgttcccgtccaaagaaatgctcacagccgatttcaaggacaaacgcaactgtttcaatatctcggaaggaagtattatccccttgctgtttccaatctgaataatgtttgttaccataatgttataactttaaaattgattatcacaacacaaatatagacaaagttataacaataccaaaagaaaagccaacttttttccattttcaccgataacccggccaacggctgcactcgtcgggaggctagtgccccccttgccgtgcggcgctccccgacctatgattcttatcatgtcttgtgtccttttctccgcttctaacaaacaaatctgcataaaatatagatttgcgtttccatttgaattttagttatttgataccctaactatgaatagcaaacagataactgatttttaaaacagcagaatgtttctgttttattaaaataaaaagggaacaaatttttaaggtaatacttacggaaaaaacagactttataacgtttctttttcgtacatttgcaacaatataataaaagcgaaacatataatggagaagcaaggagaaatcatactataccaaccggatgaagctgtaaggttggaagtacgtttagaagatgaaaccgtttggctcacacaagcgcagatagcagaactttttcaacgtgacagaaccgttattaccaaacatataaataatgtttttaaggaaaaggaattggaagagaaaagcaatgtgcattttttgcacattgctaattccgataagcctgtcaagttctttagtctagacgtaataatttcagttggatacagagttaaaagcgtaagaggtacgcaattcaggcaatgggcaaataaaattttaaaagaatatttattgaaaggttattctataaaccaacggctcaatgacatggaatatagaatgaacaatagattcttccaaatagagaaaaccattgctgaacatgatgcaaagatagacttctttgtacgcacctcattgcctccggtggaaggtatattctttgacggtcagatattcgatgcgtataagtttgctacagatttaataaagtctgccaaatgctcacttgtgcttatcgacaactatgtagatgaatccgtgttactcatgttgagcaaacgaaacagtggagtatcagctactatttatacacaaaataaacgcacagctccaacttgatttaaacaaacacaatgaccaatatcctcccattgaagctagaacctacaaaagtagtcatgaccgcttcttaatcattgataatacggaagtatatcatattggggcatcgctaaaggatttgggcaagaaaatgtttgctttctccaaactggaacttcctgcccatacgataattgatgtattatgaaataagctaatcacccatgcgagaagcggaagagaatataaaattcaagatggaaattgacgtattggttcccattccacgtactgtcacccgtgatttcaccagtttgaagcacctgcgtcaatggcagaaacggaatgacatcgatggttctctttactgttttgcacaccgggaatacctgctcaacgaaaagggagaatgggaacaatttaccgttatcggcaaacaggtagtgactatcggagaactggaaaggcttcttttggcaatgaagcaaaaggggttcaaccaatacagccgtgaggaatatgaagaattaatgtcttcatatttgaaaaagtgaagaattaaaaccttcattacacatttaaatacgaaaacaggatgaaaataggatatgcccgtgtttccaccaaggaacaacatctggatatgcaactggaagcgttgaaggctgccggatgcgagaaaatcttctctgagaaaatgaccggacgtcaacaaaaccgcccggaactggatgcctgcctgagctttctccgggaaggcgacacacttgtcgtatataagctggaccggcttggccgttcgctgaagaatatccttacgctattggaagatttcaagaataggggcatccaattcacctcactgcaagacaacatcagtacggaaggcgcaatcggccaactgatgaacaacattctcggtgctttcgctcagtttgaaagagaccttatctatgagagaacccaagaaggcagaagaatcgccaaggaaaaaggtgtcaaattcggcagaaagacacttatcaacaaaaacaacatcgccaagcagaaaagctgcatccaactctatgaatccggaacgccggtaagggagatacagaaaatattaaacataggcagtagcggaacagtatatcgcctattaagaaggaatggaattgcgctgaaatccgagaacaaaaataacaaataacgaataaacctctgcccatccttcaaagatgattctcaaagatcgtctgcaattccacctctcagcaagattataggaaagtccccttcacggggactgattttttttaattttaatacaataactccatgcactcctgtaccgctttttccaatgcttcttccaaacaacaaaaagcgtccgcattactttcggagtcatacaacacataatctccagccctcacaaccacatgccagaccgccacgttttgttctgtttgaaacgtatattcacgagtctgtatcatccattggatacatgctgccagtgtcgggcactcgcacatatacatcggggtattccttccctcaatatcggtgcgtagcctatcctgtttgtcataccaatactcacaaggcacgtaatagtataattccttcatcataagagctgtgtcgctattaaccaatctctctttgttgatttgtgtaatcaaattttccatattagcattatttaagttgaacatctgatttattcttcagctagattcaagaccttttcattttttgtatcgggaaggtctttggtcagccgaccttttttttgatgtcattccccatctgagttctgagccttttttcggcatatcaaggtctggattgcaagcaataagccaagtttcacttatggaaaatgtcgggaagacacttcttcatcgttattttccatacagtaaaggcgcatggccgtaacttgccatttgcggaatcccgaaacctttgccgagcaaaaagccggactcggatcggaggaaagaagccgggggaggcagcccacagaaagggcaatccgatacaatcaagaaattaacctgctatacccttgtgcgagtgaaataatccatcatagacactacatacctaagtagtggtatcaatacaccgatcacatatatcatagcgtagcccaaaaggacaaaaggtaatgttttacgataaagacatgcaacagcgagcaatataaacgaaaaagaaaagccataaaccccatattgaaaaccgggtatcaactcataaacaggtacgggttccggatgaagcatggctccggccacaatagaataaaggctggtcaataatataagcagcgtatataagcaactcttaagaatcctgggatcattccttttacaatagagaatcgttcggatatcacttctaagaaactcaatgcccagtaagagagccaccataacgcctgtatcaaaagtagaaaatacattcattccgatcacctttggcgcgaagatatgtatttattctgaaaagccacgtctttgcgtattttacgatgtcgcatccgatagtccgggaagcatttttttggttcttttttggggtgactgccaaaaaagaaccccgaagccgaaatcccgggcagacgggatttctcccgtccaccttacctattttgcaatcttccctcgtccgcatagctataatagttattgcctgccacaatcacatggtcaaccaaacggatgtctaatgtttcagcggcttttttaactgcttccgtcaagcggtcatccgcactgctgggcttgcgtgctcctgatgggtggttatgtaccatgataaaagatacggcgttataatacaatgcctgcttcatgataacccgtatatccacaggggcggtatttatcccgccgcatgagatacggactttacggatgagtttggacgaactgttcagcaacagcacccacatctcttcagtagctatatcgcacaaaacaggatgcatcattttataaacattattgctggataaaagcgcaggactttcaacttgcccttctttcagccgtttatatagctcaatcgccgcataagcgacttttttacggctgggtgttagtgtttccagtacatcagacaagcacaatccttctatttccatctgttcatacttatattcttcacgtttcagtttctcactgttcgtcaaggtataaatcaactcgctgttttccatcacccgataaacgtcattcacttcaaatacggttctcttcgttttcatactgccaaaaattaaaagattaatactcgcaaacatcgcttgtcgccccaaccataaatttttcctcaactgattgggaacagtgcattgaagagaaagcgggaaagacggatcagaacgggattgaactggtaaatactacctcccggaatgggaggatggagatttggcttttcaatatcgggcgttccggccacgcctaccttcgcaatgttcctatcagttcaggaaaaaatcatcatacctctcttccggcatagccggagcgtagagcgttagggatagcagggaaaagcctggagggtaacgaggacttgcaacgaatagcccggtcagaagggaacgccctgaaaaactaattcggatacagaagatgaacagaaccgccttccaatcatataaaaaagcgtgaaaatcaacacatacttccgaaaaatctttttccgaaagtacgtatagggcatgtgaagggaaaatttattttcccagtcatttctatgttatcgctttggggatatttaaaggggttaggagtttaggtctttattatgtattttggtggatggttttacacagccgataccttttatttaaaaatttctctcttttatttcactgatataccgacatataaaaaaaacagggattacctattcccttcattaacgggtggacggttttacacagctgacaagtgaaaccggacgcttttacacaactaaagcaaaaggagtggacggttctacacaactagaagcaacaaacgggacacttctacacaactaaaacaggcaaagcggatgactccacacatctaatcaccccaatagggacacttctacacaactaattctataaaaaaccgtgaaacgtggacggttctacacagctggatcgtccatgttcaccgccccgtccgtctccggagatatgaactcttcaggagcaggagcaacttccgttccattggcactctccaactcttcctgtgcccatccttccggaaacctgccgaatacagccacgaaatcactgatatatatctgtttcttcttttctacgctttccggggagtttgcccataaaaggaactctttatacagtccggcatcttcctccacctctttgatcttcttcctcctgacagccatatccgtgtccgggtaggcaatctcgacatacagcccaagcaggttcttatagaatttcttcaccacgacagcatattgtccttcatcaaaatagtgcagcgtatgcctaggaaacgagaacaacacggtatatgcccatctctcatgatcgcctttcacaaaagagaaattgaaattggtatatttcaggtaagtattcatctttttcagtatcgaggcgaccttctttttccggtctttgggttcggcaatctctatgccgagctttttagccagctgatcgactgtcagcacataaaaaggagcctcattcttggtggtcttatacttgatcaggtaaaccatcttggaaagttccagatagaaatagcggtaacggctgggcaggctacggtaatcctgaagttccaagaggttatagagcgagaacatgaaattctttatctccgggcttaccactgccgagtacagccttttcgttgacttcttcgtcttgaaatcggtcattatgtcgaaacgtttcaagatctgcacgaaattataggatgtacggccatcctcgccaatggtcggatagcagaggttctccaatcccagtttatagagagccgcctcaaaaaccgtctcgataggatggctgattctctgtcctgccgtgtcggtacatacatattccggctgcatattctttccgaacatggccgcgagctgccggctatccagcttgcgctgcaagttggtacggtcataccccatcttacggcagaagtcttctacggagaaccaggaagtcccgaacaagtctttgaggtgatagctgcccaggtatatgatcagatcgagcatgacatttccacctgcctcatacaaccgttcaatcagcacggaattatagctttccccaagcaccctagggacacgaatcagttcttttgccatgataatacttacaaaatcaatcctttctctgttttcattgccacaaagataggcataccggccaacatacgcgtcataattatcaatcagttttaacggtatgaccggtatgggaaaaggagaagtactttcctgaagaatgctttatccgcccttcatcagaaagaaagcatcttacacctgtaccccatagacatcctatattactttttcagttcttccgataaaaaggaacggtctatcaatacttgcaccaatggtttctctttgacaaactcatcaagctcacgctttatcaatttattgcccaaccctatgcgtcgtccaaattcctcgaaatccttccgccctacctgatgagcaatttgactccacattgtcatctgtaatcgactcaaccctcggtctaaggtgtagatcgttaggttatcagtacagcgaaatcatccgttctctcatgagtatctacttctgtggtggctcatgtattgaggatgtcactactcatttgatgaaccatctctcgcttcatccgacacttcatacttgtagttctgatactatcctcagagcgataaaggaactgacgcaagaaaacatctcatacacatcagatacgggtaagaactacgatttcaacacggctgacactctcaatactttactgctcaattgtatgtttgcatctgaccaactgaaagagggtgagaagtatgatgcaaagcctacatacaagaagttctctggttatcgccctggcgtggcggttattggtgacttgattgttggcattgagaatagcgatggtaacacaaaagttccatttcatggcacgttttctcgccatggcagagcttaagtaaacttagctctgctcatctggcttaacgaaaaccttcgttttcatcagaaggacacgctgaagaggttctttgagagatttgagcagaacaggctcactatcaatcgtttcagagctgattgcggatcatgttccgaggaaatcgtggaggaaatagagaaacactgcaagtccttctatatccgcactaaccgctgcagttcgctctacaatgacatatttgctctcagaggctggaagactgaggaaatcaatggcattgagtttgaattgaactctatccttgttgagaagtggaagggtaaagcataccgacttgtgattcaaagacagaaacggatggatggtgtgcaggatctttgggaaggagaatacacataccgttgtatcctgactaacgactatgaatcttccgtaagagaaattgtcgagttctataaccttcgtggaggaaaggaacgtatctttgatgatatgaacaatggtttcgggtgggacagattgcccaaatccttcatggccgagaacactgtgttccttcttcttacagcacttatccgtaacttctacaaggccattatccaaagacttgacgtaaagaggttcggactcaatgcaacaagtcgcataaaagcgtttgtcttcaggtttatctctgtaccagccaagtggatcaggacatcaaggcggtatgtgctgaatatctatacctgtaacaatgcttacgcagatatttttcagactgattttggataacgcctacaacttatgggtatgatactgcgtattgtctcaagtcgcattgtggggtaaggggatgttgtaggcagaagtgggtgtttctgcctcaatttatctgataattcagtaatgagaggacgtgtacacgcaagaaggacgttgaagggcttagttgcggatttgaggcaggtaagaaaatacaaagaattaacagcaaccgagaaactgaaataccgtatcgcagtgaaaatgacggcagccgactacttccgcctgctgacacgatcgcatgaggcgggcgtatcaccaagcgagtacatgagggaatgtttccgtaacggtcatgtgaaagaacggctgtcggaggaacatgccggatacatccgccaactctgcggcatggctaacaatctcaaccagcttgcgcgtaaggcaaacgccggaggcttccacgatgaacggtgggactgcaaggtggcagtggcaaggattcatgaacttataaccaagatagggatatgatggcgaaaatcgtaaaaggaagcgacttcaagggtgcggtggattacatcatcgacaagaagaaggatacgcagatagtagcaagcgaaggcttgtttatggaaaatctggaaactatcgccatgagtttcaatgcccagtcacggatgaacgataaggtgacaaaacctgtcggacatatcgcgttgagtttttccaaagaggatgagttacggctgacgaaccgtatcatggcaggcatcgcgcttgaatatatggaacggatgggaatcaagaatacgcagttcttcatcgcccagcatttcgacaaggagcatccgcacgtgcatattgctttcaaccgcatagacaacaacggcaataccatatcggacaggcacgagcgtctgcgcagtacccgcatctgcaaggaattgaccttgaaatacggcttgcatatggctggcggaaaggacaatgtcaaacgcaaccgcctgaaagagccagacaggacgaaatatgcgctttacgacatcatcaaaatggaagtcggcagatgcggcaactggaacgtgcttatcgccaacctgaaacggcagggagtggaagtacatttcaagcataaggggcagaccagcgaggtgcagggtgttgtattctccatgaatggctaccatttcaacggctccaaagtggacaggcgtttcagttattccaagattgacgcggctttgcagcacaacagatgcagggaacgtatgggaataacagccggaatatatgaaacggctacaccaagcgcaccgtccggcacggcacaaagcgagttgttcaacggctcttggggattgctaaaaagcagtggctcatcttataacactgctgatgcggaagccaatcaggaaatggtggatatacttcgcagaaggaagaaagttaagcgcaagagaggtgttgggttctaatattctgtactaatccaattctcacgacacttgcgctctatattcattcggagtgtaacctacctctttcttgaacagtcgggtaaaatgttgcgggtactgaaaaccgagattataggcgatttcattaacggtgtcgtctgtagatgcaagttccgtcttggctatttcaatagacttgtcatgaatgaaatgcagggcggttgaacctgtttcttttttcaataaatcactgaaatagttgggcgagaggcagagcttgtctgcacaatactgtacagtgggcaagcctatccgtttagcagccccatcatggaagtattcgtcaagcaaccgctcaaatcttgcgaggatgtctcggttttggttgtcgcgtgtgatgaactgacggtcatagaaacgtgtgcagtaatcaaggaacgtcttgatgctgtctgtgatgaggttcttgctgtgacggtgtatcggatggttcaattcatattgaatcttgtggaagcaatccatgatgatttgccgttcttccacactaaggtgcaatgcctcgtttgtctcgtaggaaaagaacgaatattcacgcattatccgcccgagaggtgtattccgcagcaggtcgggatggaacataagcaggtagccatctggttggaactgcatgccgtcatcttccgcaccgaacacctgtccgggcgcgataaatatcagtgtgcataattattcctaagtctgtgaaaccggaacgcatgaagcagaatctcgacatattagacttcaccctgtcggccgacgacatggcacggataaagacgctggataccgacaagcctttcttactcggctcgcacgaagatccagaaatcgtaaaatggttcatgcagtacaaaaacgcctgaacatcaacaaccatatttcgatagccgctatcgactatattaagaagttattcgtatatgcctttattgtaatccgtcatgtactgagtaaatgttttgcctgtttgctgtttgaagaagcgcatgagatggctcggatcagagaaattgaaatcatccgccatttcactgacagtgcggttggagaatagcaattcgttcttcagttcctcaagcagacgttgttttatcaaatgggtagctgatactccgaattgggcttttactgagttattgagtgtgatgcgactgacatgaagcatgtctgcatattcctgcacccgctggtgggtgcggatattctgttccaacaagtccttgaaccgaaaagcgaaattgtttttagcaatttcagcgggcaagcaataggcggcagcgtatgtacgattgataatcagcaaaagataatatagtaaggaaacaatgatattgtacgtatcggacactggattcatcagctcatacttaatctttccgagcagccgcatatattccttcatttcgtcatgtgtggcattgatgtaaggcggcgtatctgtctggtaacaatacaaaaggcgaaaaacgaagaacttgtcggcgataaaagtacgcatgaaatcttcgcggaatataaggaacgtgtaatccaacgccgtctcatctacatgccactcttgttgctgatggggtgaaagcaggagaaccatgccgtcgcgcagttcaatcttgcggaagttcagtagcaaatatccgtttgccttacggaaaaagtagaagctgaagaagtctgtcttaaaccgcttgttttctgtcagcacaagtccgatgtccttgtttatggcagtattgatgtaaaaatccacgccgcagcgtgtcttgttgaacggtacgctgaccagtcgatcagggttgattatctcgtccatatccttgtcgtttttgcaaagataataatttcatttatcaaaatggcataattaccgttttttcaggcatagatgtttcgccggattcttccgaactttgcacccgtaatcaataacaagacatatagtcatgaaaaagacatctacagtacaattggtgcgcaatgccaccttgaaaatcaggtatgcgggacacaccatgctaattgaccccgttttagccgacaaaggcactttgatatcggccctcggtgtgaataaaacaccgagggtacacctcaccattcctattcaggatattatcggaggcgtggacatggtgctcctgacccacaatcacatcgaccattacgagccgagtgtccccacacatttgcccaaagaaattcctttctacgttcagccccaggacgcggacgccatcagaaacgacggatttacaaatgtgatacccatcgaagaaataaaaacaatagacggcatatccatttaccgcacgaccggacatcatggtttcgggcagatcgggcagatgatgggacctgtatcaggttatgtgctaaaagccgagggcttcccgaccgtttatataatgggtgactgccgatgggaagcatgtatccgagacaccgtggaacggttcaatcctgactatatcgtggtaaactccggaggtgcaatctttcccgaattttccaaaacggacggtcctatcatccccgacgagaacgaagtgatgcagatacttgacgaattgccttcgcatatcaagctgatagccgtacacatggatgccatcgaccattgccagaccacccgtgcaattctgcgcaatgaggcaacgcatcacgaagccgacatgagccggctgattatcccggaggacggagaaacagttgtgttatgagtgtctgcattaaatccctgataaaaaacatgaacatagtggtagggtgcactataggatgcccttactgctatgcccgtaacaactgccgccgtttccacattaccgacgacttttccgtgcctgaatacatggaacgaaaactgcgcatcatcgatacgtcccgtcctcatgtgtggctcatgacaggaatgagcgatttctccgattggaagcctgaatggaacgcagaaattttcgagcggatcagcagcaatccccagcacgcctatatctttctgacgaagcgccctgacaaaatcagtttctcctctgacgacgagaacgtatggatgggcgtgaccgttacgcgcagttccgagaaaaggaggattgatgatttgaaaaagaatatcaaagcacgacactaccatgtcacgtttgaacctctcttcgatgatatcggcgagattgatttcgagggaattgactggattgtcataggcacagagaccggaaaccgaaaaggaaagtcatattcgcgccccgaatgggtgcttagcattgcagaacaggcaaaggctcatggcataccggtgttcatgaaagaggatttgctgccgattatgggcgacgaaagaatgattcaggaattgccggaacaatttaccagacgaatacaatgaatatggatacaataaaggaaatagatgtaaagagtgtaatgaccaaatcctctctgccggtgggaggatattcggtcaacccttatgtagggtgtccccacgcctgcaggtattgctacgcatcgttcatgaaacggttcaccgggcacaccgagccgtggggtacgtttttagatgtaaaaaactggaagccgataacgaatcctcataaatacgacggtgaacgtgttgtaatagggtctgtgacggacggttacaatccgtatgaagaagaattccaccgtacccgaaggctgctcgaagagctgcgaggaagcgatgccgagattatgatatgcacaaagtccgatcttgtccttcgcgatctcgacctgttgaagagttttcccaaagtgactgtgtcatggtctgtcaatacgctcgacgagcagttctgcgcagatatggacaacgccgtaagcattgaacgccgtctgaaagcgatgcgtcagacatacgaggcaggtatccgcaccgtatgcttcgtctcgcccatattccccagaataacagacgtaaaggcaataatagaggaggtaaaagattatgctgatttaatctggcttgaaaacctgaatttacgcgggcagttcaaaggcgggataatgacgtatatccgtgagaagtatcctgacctcataccgctttacgaggaaatttacaataaaaaaaggcttgaatactggcaggcattggagcaggacatttcaaattacgccaaggagcagggcttcccgtatcgtataaacgatctgccatacggacgctcggaaaaaggcaaacctgtcatcgtaaactacttctaccacgaaaaaatacgattgacaaaatgaggctatgccggactgatgcagaaaagttgtagcgcggataaaagcaccatgtatgtggataatatccggcaatcttccgagcgtatgcgggagatgctcaacacgctgctggatttcttccgtctggacaacggcaaggagcaacccaacctttccccttgcaggatttccgcaatcacgcatattcttgaaacggagttcatgcccattgccatgaacaaggggctgactttgatagtggagagccacaccgatgcggtggttttgaccgacaaggaacgtatcctgcaaatcggcaacaacttgttgtcaaacgccatcaagttcacggataacggtagtgtatcattggcagcggattatgataacggtttgctgaaacttatcgttgaagataccggtacgggcatgaccgaagatgagcaacaacgagtattcggtgcatttgaacgtctttcaaatgccgccgcaaaagacggcttcggattaggcttcctgcaaccagccgttatccaacagccgggttaaatgcgtcctccctatctcggccgtcccttgcaggacgacacagcggtctttctcctggagctttcttaattcctccagtgaagccgccattttctccgccattgttgccataaccgtttttatttagattctgattattttcgtgcaaatactcgtttttagacacgtgtaaatactcgtttttaattatgtgcatttactcgtatttgttgcaaaaatacaatatttgttccgataatcagctactaatgaagtctttttttacttgttgtatcgtcgaaacggcctttcccgtgagcttcgccacgttccggatcgagtagcctttctttaacaaggcgatcgcctcccggtattcctctttcctctgttcggccgttttccggcttcccggcttccgtcccagcctgccccctttctggatgtacaactcccgtccgctattaaggcggtcgatgatcccctggcgttcgatcgcggccagttcccccaacagggtagtgatcagagaggacaaggggtttaccgtcttgtccggccgtaacgtttccaggttcaggttttgaatatacacgcatattttatgcgtgtgcagcgtatcgagtgactttaggatctccagggttgaacgccccaggcgtgagatctcggtcagcaacaacatatccacccggttctgcggatctgtgcagtattccaggcaacggcttaaaaccgggcgttcgatattggcctttcgtccgcttatcttttcctcaaagaccgccgtcacctcgtacccccgtccggctgcgaacctctccagatcgacaacctgccgttcggtcgattgcctggccgactgcgagcttacacgtgaataaataaccacattcatcccttttgcttttgttcttccttatctattgttttaatcaccttatccacctctttcaaggaggcattatttccggatctatccaaaaaagaaattcgctaattaacctataattactatctttgcattgtaatgcttggtaaagcctctgttatcaaaacacgtaaccaagtcaaggatatacccgttcatcaagaacgggtttttcttttgcgacagcccattcataagacaaaggatattataacaggtcagtaatcacagccgccggaatatccagctttgagaaagcgaacatctttttccccagatcctttaacgaggctccgatatggtacacgtccgtttcatcaacgatcaggaaacggtcgtgactgtcccggtacgtcctgatgtcgataggtgggtactggctgttatgcctgtcaagatcaagttggagttgctgcgtgatacgctgggtgtaaatggtggccgagacaccgacgctgcgtttactcaacatgagcaagaccgtttcgtccacatagttgtcgataagcacgatcgaacgcctggccgactttaccagatcggtagcgaacttgtacgcatcgaaaatctggccgttataaaaaatgccttcgaccgggggcaaggcagtacgcacaaaaaaatctatcttctcggtatgttgagcgacagtcctttcaagttctgacaaacgtttattaatggaatacccttttaaaagatagtcctttaaaaccttattcgcccattgcctaaataaaatacctcttttactattgacacgaaacccaatggatatgatcgcatccaaattgtaataagtcagattgcgcatcacttgccgtttgccttcctgtcgaactgttcggaaatcccgaacagttgaactttcctctaattctttctgatcatatatgttttttatatgctcgcttatatttgctttgctggattgaaaaagatccacaatttgcgcctgtgtcagccaaacggtttcatcttccagcctcacttccaacctgaccgcttcatccggctggtataatatgatttctccctgttccattacttatttaccttttcttaattcatcaagcctctgcatcgcaccgctgaacttctcactaaacatcatatcatcgggcaaaacaaaccaggtgggaatacctctcgactgtggattacctatacattcatcttgcccgttctgtttgcggtaatcgtcccattcactataagcgatgttccaacgaatacctaatttataggtattttcccatttaataatagccagtgaataggccggatcatctttgccgtcataaatcacttctacaacttcaaccacccctttaggggaatttataaacttcggatttttatacgaataagtgctcatgtcttttattttttattcatagcacacaaagatactcaaaacaaatatatacatatatacatacgtatgattaacgtataaaaacatttatggttattctaatctttgattaattccggtacagaaacaaaacgtaccgaaagacggaaacaggatttatttcggtacgcttccccgatcggtacaaaaaacacgcaaaaaacgaaaatactacttttagtcttttagtatattagtattttgactatatgttgcggacatgacaaccatttaaaaaactgaatttatgagcaaagcaaaagtaatctccgtattgaatcacaaggggggagtaggaaagaccacaaccacgatcaacctgggcggtgcgttacgtcaaaaagggtacaaggttcttttgatcgaccttgacgggcaggccaacctgaccgaatcgctgggcttctctgcggagcttccccaaacgatctacggtgcgatgaaaggcgaatacgacctgccgatctacgagcataaggacggccttagcgtcgttccctcctgcctggatctctcggccgttgaaacggagttaatcaacgaggccggacgggagcttatcttagcccaccttatcaagggccaaaaggagaaattcgattatatcctgatcgactgtcccccctcgctgtcgctgctcacgcttaacgcactgacggcctcggatcggttgattatcccggttcaggctcaattcctggcaatgcgtggaatggccaaacttatgcaggtcgtccacaaggtgcagcaacgtttgaactcggatctttcgatagccggggttctgataacccagtacgacggaagaaagaacctgaacaagagcgtttcggaactggtacaggaaacattccagggcaaagtgttcagcacccatatacgcaacgccattacgctggccgaagccccgacacaagggcaggatatttttcactatgcccccaaatctgccggggcagaggactacgaaaaggtatgtaacgaactgctaacagaaataaagtaaccatatggcaaagaagaacgatttaaaaaacagtatgtcggccgggctgaccgggggattagacagcctgatccaatccacggccgggcaaaaagaggctcaaaagccgaagaaagcgaaaaccgtgcattgtaattttgtcatggacgaaacctatcaccagaacttaaagctgatcgcgatccgcaaaggcgattcgctaaaatcggtattgcaagaggctatatctgactacttggataaaaacagttccctgctataacagcgtatcgggaatatacagggcaaacactccacaaaagaaattctccaggaaaaaggtacgcaaaaagcacccctacacatcaaaaagtatattgaaaatgcgattccctataaagaacccgttggcgggattaatcttgcgtatgtttaacctgccaacgggtacgatattgataaactttttgtttaaggtttaacgtttacgttgctatttgcatcaacccagcctgttgtctctgcatcaaactggatcggattcaacacagcctctccctgatcagtataaccaccaccgaaaatcaacgtgtagatatgacgcttgcccgctacccatgtatctccgaacggaacataaattgttccgtaactatctgctgaacccaacagataacctccggactgctggattttgcaggtgatcgacaggtaacattgatgcgcaccgtcggcttttatcttggtattggtggcttcttcggaaactttccatgctgtcagcttctgtggtatattcagcataggagttttttcggaaatatcggtagctgtggtattactattgacctcgatgaatttgccttgcactacggtaataaaacctcctcctgtagagctttcaggccaatcacccacagcccaacttcccgttccatcggctgtcgcaggcaatgtgtagacgccgcccatttttacattaaaaatcttgatgtcctttatattcacctgcatgttatcgtattcggtctttgctttgaatacgacctgtgacagaatatgcttgaagttaaatttcactactccgttgttcttgtcttttgtctggcctttggctatggcatacatcacgtcgtagttttcatgagcattgataccagatccatactcatcggagcaggaataagttatcttttgagtatccttggtggcttcccacatataactccactgcatggcttcatcaaccgttccgggattgaatgcgtaaaagtccaaagcctcggtaggccaataacgaaggtcgctcgcatttttataatcccacttaccattattgtacacgatattcactccgtcatgtccaaaatccgtgtctacctttcccatgaaggcagtaccatccgccgtaaaagcgaacacgtcgaaatcggtgttcttcaagttggtgttggtagtaggggtagccctcgtttccgccgcattacttaacacgttaaaaccaatcgcattccgtgaggaggtttccacattcgcaatctcctcgtctgagcaacccatgagtagagctccaaagattgcccaaagcattactgtactttttttcataaataaaaataaatcaaattgatacatataattaataaactcatattacaacactatatccatattcacatcatcccaatcatcaacgtccacatcaaatcccgcaccgtcacttcccggctcggatggaacctcataatcaaaattcaacaccagatgcacatcaccgacatgccccactaccgggacatcatgcacttggccgctcacgtcctgttccaatacagacatgctgcctgaacggttcttgagatacaaccggaaaacattgggctctccttcaagtgcggaatgtccaaacgtatagaatccgcctataatctgattccgtgaaaccattccatcaaagagcaggctctccgaaagaccggcgggcaaactgtcggcggacatgttaagcgagccggacatgccggaaagagcggcccgcaaatccgccaccctatccagtccccgaagaccgttcacctcatacgtgtagtgacataccatgtttacgggagtcagccgtactatctccgcgcttcctcccggaatgtccttgaggataacttcgtctatatggtcgccacacagccaaggtggggtgacagccattgtccggttatccggcgactgcacatcacgcgtatcggcagtaaaaagcgtgtaactgccgttttctttccaaaccatcccgtcggtatcgtagttgaagcaaattacccggtaatcattctcgggaagctccacttccccatcctctcctccggggaaatcaaatatccacgtgttgctttcatcgtcggtcggataaaatacgaccctcatgccttcaggcttgtcatgattggaaatcttggtccagtcgaatattacccgcaccgtggcaaagtgcggatgatcgtaacataaatccttatgctcacaagccgtcagtcctatccataaaaatatgaacaccagactaaagcgtatccgtatcactgcctgcctcctttcttccggctataattcccccgcccgatcaaccacaccaaagagatacccgccttggtcgggccgaaccagcggcggtttttagtggtctgccatacatagtgaccgtccaaagggatgtactccttgtacgatcctccaaggtagccgattcccaacgtgaaatccacattgaaccgatgtcccacaggtaacgagtagccgtaagccacgcctcccccgtaactccatttatcccccaagtaacctttcccacccaattcgaaatcataggtgacgatctgcccgtacaatccgacatgatgcccggaaaacggtttttccaccgctctccgaccgaaccagcggcgcaactccacatctcccccatagatacgccaataattatgcttccgatcacttttccaccaggcatacatccaattcccggccacagaccagttcttccccaaacagaactcaaccccgatgtcaggtatcaaaacagcgtcataaagcaagtttgttttcaccgccatgcaaaacggccgtttctttaccggagctatgacggtaacggtatcacggatgcacaacgtatcacgtgtatgtatatataccgtatctctgacgggatttatcggatcactatcatagcatattttcaccatcgacgaacgaagtttcggaaaatggaatttatacaaatatgagtatggcctcccccctttcagtcttttcagttctccccccaaataagggctgtcctggttttccaaacggacgatcttctccaacaaacgaaggacatcctccctctccggaacattcacatccgctctcaccatcgttataagtccgttccagtcgcttcccgaaaaatgaaaatccttctccaataccggaatctttatataaggtgatatataccgccacaaaacctctgctcgtttttcagacagccttccattcaacagcccccctccttccggggaagctcctcctattatttgaattttcctgataagacggacggagtcgttcaatgcggaacagattttagcaaaccgctccatctcgttcccattgtcaagtaaacatgtatctatatttacctttccttgatgaaaatagatccttaccgaatcacgcttctcctgagcggatatttctccgcttatactcaacacgagcacgaacaatacacatttaatataaaaaaaacatcttttcgtcatttaatcatttgttaatatgacaatccaaacccaggcttttacaccccctgaatttcaaccgctaaagatatgcacttataaaccaacctccaaagcaaaaaacaagtattttaaacttataaatacttaaaaagacaaccacacaacagctacaacacttaccacagcagccaatcacgcttacacaacaattaaaaacacttaacatcataaagaaaagtacttaaacatacaaaaaaaaaaaaaaaacagttatttttgcaggaaacattatacttaataacacttaaaacaataaaacacatgaaaatcagcacaaaagccgcctcttttctaagttcaataaaaactcaaacttacgacaaaaaagaaagagaaatgataataacgtatcaacaaaaacgagtctttcatctatccctgctcatgctggtcttatgcgcacccatatacatatattcagttccatttcccaatgaacagttttattatattaacagcgtattattcctgtttatcattatgtgcactctcgcttattttaaaaagagagtaaatctgaccacgaccttttccattatactgatagccatacatatcgagatttttatcgaaataatttattgctcaatatgtagcggatatgaatatagttatcaaagagcattgataatgagtaacattactatctctctcttatttaccatgctttccatctgtgcctatatgagtaatatctccatcctattgtcctcccttaccatagcttcctatacaatctgcacacttatcaccgacgaaccgttcctatacagttatctgcctttgatcatcatcatatacaccatgatccccttattaggaagatccttacacagtaatatcagcagcttgctaaaaagtagcaacttgctaaaagaggaagaggaaatgcttttgaaacgtctccaaatgaaaaaggaagaactattcgcgttcgccgagttgttaagcgagaataacccggaagaaaagacaagctccctgttaaacataataggggaacaatccaaagaaaatctttttacagcccttgccgcataccagaaaaaggaaaaaagtaaacttgatacaatcaggagaatatatcccaatttatccccgtccgaattaaacatctgccgtttaatactgcaagacaagaccgtcagccaaatatgcgaattattacatcggagtagcggaaacataaccagccaacgagcgaacatacgtgccaaactcggactgaaaaaaagcgacaatttaaaagaagcattacaagaacgcatgaggctgtatgaagaagaagaacaccggcaagaagagttttcagccatgcgttagggattgcagagtaaagcccacagcctttaggcgaggacttgaaacgtaaagcccgaccgtcccacaggaacgcccaaaagaaaaagaatcccccgaacattcatccgggggacatccaagccgtcacatcaattataatacagattcagatcatccgtgccaatctcctttccgtcccggaaaacaaggcgtaaatcaatcctctctctgttttcattgccacaaagatagacataccggccaacatacgcatcatacttatcaatcagttctaacggtatgaccggcatgggaaaaggatacacctatattgcatatagcggaaaatttgtaagattaccctgtactttataaggcaacatagaaaatctctccgcatgcaattccggtctttttcccagtaatgctgtcaacgaattggcccggacattcccttcggccttcacttctatcggcaccatttgggcattacgttgaataacaaaatccaactcaagacgcgaattgtctgtgttatggtaataaatcggtgacacgcccttacttttcatctgctgcaatacatactgttcagtcattcctcccttgtattccttaaatatgtcgtttttaatcaagacttgggccggatctgtcttgaccatagcacccataagccccaaatcaaccatatagagtttgaaagccgacaggtcttcataaatatcaagcggaagctccggtttggtacatcgaggcactttatacaacaacccggcatttacaagccattgaatggccatctcaaaatcattggctctggcaccttttcgcaaagctccgtaaatgaatttcttgttttctttaaataattgggaaggaatgctgttccataccattcggacacgcggaacctgttctttgggcgcatgttttgagaagtcaagatcatagccttgcaaaatctccgactgtattcttctgacttccagcaaggaatccgtttctacatatttgagtacaacttccggcataccacctacataataatattgccgaaggagatccgtatatttgtcatgcaggaggcttatcgtttcaaaatccccactcataagcaatttacaagcttcttcttctcccttggcgacaagaaactcttcaaagttcataggaaatatattgatgacatttaccttccctacgggataagacacatcctgatgaagggatatccccaaaagtgaacctgccacagctatatgatactccggaacctcctctttaaaatacttcaaagattccagtgcttccgggatatcttgtatctcatcaaggataataagcgtatcacccggagtaatgtcaacggaagtcatcgcacgcagcccccgtaaaattctgtcaacattgaaatcctgagaaaaaagctggcgtgcaaggttattcttacggcataccacataagcctcttttttgtattcaagtttggcaaactcatggagcagccatgttttcccaacttgtcgggcaccatttaaaatcagaggttttctatcctcacggtttttccattctataagttgttgcaaaacaaatcttttcatctacaaacagcatttttatacatgtaaaaacagcgtataatacatttatccgcacttatttaaagcacaaatatactaaaataaacagataatagaagcaatcttatacatttttccgcactttaatcaactccaatggaaagcagtagccaatttaggattgccttctccacgctcgatggccaccagcgtattgatgcccacgcccgccagttcggagaagttccagctgattgaccttcaaactcttcctgcactctttaatcatctttcctagctctttcatattcacaacacattgtgattttagtcagttttcatcctagttcaaagaaaaaaacagccgataaagcaactataatcattgtattcatatagattaacatcatatattcaagttaatctatatatttacatggattatttgtatatttgcaaaaaaggaacaaccatgtggaatgaaatgagcaatccagctgtgctgatgagaatcggccagcgcatcaaagagacacgtatcaggcagcatatcacgcaggaagaactggcaacggcttccggtgtaagccccttgaccgttgcgaacatcgagaagggcaaatcggtatcgctgctgttgttcatcagcgtactccgctcgctcggcctgctggagaacctggagcaactggtaccggaaatccgggtcagcccgatagagctcaaaaaactgcaaggaaagaaacgctaccgtgtacgccatttaaaacaagataaccatgaatgatttgatagtagatgtaaagctatggggagaaagcgtaggctctctctattgggaaaaggaaagcaatgccgccttgttcgactatgaacggaagttcatccgctccggtcttgacatttctcccatcatcatgcccatcagccagtacaggaacaccccctaccggttccttgaaaaccgtaccgactgtttcaaggggttgcccggcctgtttgccgattcactgccggacactttcggaaaccagatcatcaatgaatggtttgccagcaagggattgtccggagaagagattacccctttagacaggctttgctatgtaggcaaacgtggcatgggcgcactggagtttgagccgtcctcgccaatcaacggcatgaacgaatcatcagtgctccatatcgaggaactgactgagcttgccaaatccgtattcacggacagaatggcttttcaggtccaactgcgccaggaaggaagaaacattctggatatactgaaagtgggaacatctgccggaggtgccaagcccaaggccatcatcgcctacaacgatattaccggagaggtacgctccggacaggtaaaagctcctgaaggattcgggtattggctgttgaaatttgatggcggcaaatacagcgaacacacgcagataacggacaatccacaaggaataggaaatatcgaatatgcctatcaccggatggcaaaagcctgcggtatcgatatgatggaatgccggttacttcaggaaaaagagtcatatcactttatgacacgacgttttgaccgtatggaagacggagagaagatccatgtacagacattggccgggcttgcccactatgaccgtgaccaacgccattcatacgaagagatattccgtatcatgcggcagatgaacctcccttatccagagcaggaggaactataccgaagaatggtgttcaacgtcatgagccggaaccatgacgaccatagcaagaacttatctttcctgatggatagacaagggaagtggaaactggccccagcatacgacctctgctactcatacacaccgggcggcaaatggacgaaccgccaccagctgtcactcaacggcaaacaagacaatttcacgatggaagatctgcaaaaggtaggtgagaacatgggtatccggaaacacaaacagattatcgaagagatacaggaaaccgtatcgcattggcatgagactgccaaggattgcggggtcaagccggaacacgccgattttatcggagaaaacctgctcttgttcggcaagcaactgcatacgatccatatgccggacattgccaacgaacaagagcaggctttcatgaaggctatgcgaaatgatgacttcaataccattctgaaactgaagatgagaggatatcagccatcggagaacacactgaaaagcctccagccggatgtatccgccaccaccttcatcgctgccgccaaaatcttccaaatggaagggatgctaaaaagccttcaggacataaaacccgcgcaaagcccgattacaggcggcaataaacgtagcatggaattgggggattagcacacaaactacatcgcgcacaattcaatataacagtaaatatattaattgttatatatcatattttgatttaacaattaatatatttacctttgtaaaatgacaacgaatcacatcacccaagccatggccaatccggaaatcatagtggaactgggcagacgatttaaggaatacaggctaacctataggctcacccaaaaagaggctgccgagaaagccggtgtcagccttatcaccttacgccagtttgagaacgggaaggcctataacatcaatatgggcaactttcttgccctgttacgagtagtggactgtctggaacagatggatgatctgatgccggaaatacctgtttcagcctatacaatggaacgaataatgaataaaaagccgaaaaggataagacatggaaaataatgttgtgagtgttatgttatggggagaagaagtcggaaagctctattgggacgaaagaaacaaaagagccgtcttcaactatcatccggatttcatcaagaaaggagtggaaatcgccccactgaccgcttctgtcaaaggaccggcggcaaagggtatgcccatactcggaaacaaagaaaagacttatcaaggtctcccaccgtttttggcagattcattgcctgatcggtggggtaacatggtcttcgaccaatgggcggcacaaaaccatatccccaagcgcaaactcacaccggtagataaactgtctttcatcgggaaacggggaatgggagcctttgagttcatcccggccactcctggattggaatcctcttccactctccagatagagagtttataccaactggcacgccgtatctttgaggaacgggaggaaatatccgtgcaagatgacgaagcactgcaactgcaaagtatctatgagataggtacatcagccggagggcagcacccgaaagccatcatcgccatcaatgaaacgacacatgatatacgttccggccaagtccctttaccggagggctatacctactacatattgaagtttgcagaaggggacgattttccgttcacgcaaatggaaatggtatattatgagatggcaaaggaagccgggattacgatgatgccttcccgactcattcaaattgagggaaaacatcacttcctgacggagcgttacgataggataaacggagagaagatacatacacagacacttgctgccatgaatccggatgcaacgagctatgaggatttgtttgaagtctgccgaaaactgaacatcccggcaagcgaacagtccgaactctaccgtaggacggtattcaatatcatgggcggcaatgtggatgaccacatcaagaatttctctttcctgatggaaagaaacggcacatggcacatcaccccagcctacgacatgacattcaccaccaatttggacggtgcggcatacgaaaacgcacactccatgagcattgcaggaaaagataacgacatcacggaagatgacctgatgcaatttgccaaacagaacggaataaagaatgcgaaaaggataatcgaagaagtcagccttgccatcagccatttttacgattatgccaccaatcatcaaatcgatgactattggaaagaccgcatcgaagagcatctttccggtttggtatctccgatcatagggaaaaccatgaaacactacctgcccaccattgtcgaaccctacgagacagaggatggctttttggtatcagaaatcaacatcatcgaaaacacccggcatgatttccgtatcgaggccttcataaacggaaagcgacagaaatacattgccgggcgtaaaagcgatttggctgctgaagtcattgccaaaggcagaaacaagatgcccgttgagaacaagaaagaacttgtggaacggttgttactgcctttagctagaagataaaaacagacgaatagcgacactattacattaataaaaagtctgttcttgttcggcaagcaactgcatacgatccaaatccggacattgccaacgaacaagaggaggctttcatgaaggctatgcgaaatgatgacttttcaataccattctggaactgaagatgagaggatatcagccatcggagaacacactgaaaagcctccagccggatatatcctccaccaccttcatcgctgctgtcaaaatcttccaaatggaaggggtactaaaaagccttcaggacataaagtctgcgcaaagcccgattacaagcggtaataaacgtaacatggagcaaacaaatttactattcaattttcagtttttttctatttctatactactgtacgccataaaataacgaagaaacttattcctatatcaattcataatcaataacatacaattcaccaagaatattagggaatgctacagtatcatatatcacctgccctactccattaaaattacccggagatattacagatgctacaacaccatgataagctgtgggagaaaaagaaagatctgctaatccatttatcccaataacatttttctgtacaccagcattattaacattacaaaaaattgcataatgaatagtttgatgtaaatttacagcagcattaggaagatgcacaaaatataatatatctccattattacatttagctaaatcatgataggtatttattttttgtatcatactttctaaagaagctccaaaaggattaactgaaattctttttcctgttgcctgttctataattcctctaactaaattagcacaccctccaccatttgtaggtaaattaacattcaaattctgagtattagtaataaattgtgtaatcaattgtctatcatttatacttatagccatatattataactcatgttctcctactctctcaaaggcttttcggaacctgcctataaaaactgtctctgtaagcttaccccacaaatctaccctataatccccaaaccgctatcatcccttttctgaatgccatggaattttttccgaatacataagttagaagatgaaaaaagattgtattcaaagtttttggttcttttttgaaaaaagaaccgctggccaaaaatccaacggttactttactttcggaaaaatatgcaatgaagtttataggccgaatgaggaacgcagcttcttcatggcattctccacatcaaagaaagacacatccataagatcttctccccatgcttccggaaagtcaagaatggaacgtccgttattaagaaccgcatcacggatggctttcatcacattctgccgagtcggttccagcttgaagaaaaggcaatgcctgactgccattgtaagggtatcatcatctataaagaaacggatggtgacggtcatgtgtacctgcgtccgtttctccagtttcttctttttagtttccagtttggccaaccgggaaacatagaatgaagggatatgtttcccggattcaacgcaagtcttcatcgcttcatgtatttcagcgatgccgtcacgtatatccgtcaagtcggtgcagttggatgcaaccgtataagccgataactttttcatctcaaaagccgtttttatatggcaaaagccctgtttgtgaaacttataatatatgaatctccttatcacctaccttctcgtccgatacgaccaatacctcgtacttcatcctcttgtaattatagactacggcaagcgtattaaagccaccgttatcataccgcctgtcataaacggtatgtacatactcatacatcgcattccccatcatgaactttacggaaacatccgtaaagtaaaatgccaccgcataagccagcgttttctttttatcaaccttttttgttttcataaccatttgtcctttattgttttctgataaaatattcaatggccgaatgaaccaatatataatgtgtgggtgtctgcctgcactgttccgcataaggattatagaactggagagccagcgcatggtataattccggcaattcccgcttgattctcgccgtaagcagccgataggagcattttctaccgtacttcatcagctcacgccatttgtcctgtgttatttccgtgcaattcgtctcgtaaaccataacttccgtttttaagttcaatattccggttggaaagcggaaaggggttgttccctctccgtttattctctaatcaattcaggcaagcttttaccgttataccggttttcagtcctttatccagctgcacggtcaacccacgaacattcacctcttgaatttgagaaagaagcacataaccccattcccattcttgaatatggcaataaccgaaaaaaagccagtcaccgtcttcctgctgttcggcttccgttaccaaccataccaccgaagaaaaaggaaggaaaaaccttgcgatgacttccgcattaagcccctgcccctcttttgagtacaaagggttggcttcaaacacattctttagttgttccgtcactgtaatcatatgtcacatttttaaagggttaaacttctaattttatgcttcagctagatttaaagacctttttttaaaacccctttccgggatgaccttttctttctgccgactttttttttgagctttcatgccccatctgagtttataagccttttttttacggcacacaacaagaaggaaggagggattgagaaaagttttggacgacaaaaaatgttggggacagcgaagccgtccggcgttatttttttcggtacaaagggcgaagaccggaactctttcgtatccatccaccgaaataaatttgccgttcaaaaacaaaggctctcagacggggctatgaaaaaacgtacattaggggaggcagaaaacaaggaaaagggcagtacggaaataaaagaagaataaaatccaacattattcacattgatatataatagccaagtatttcgccatatcaatataaatccaactataatcaaaatcaaacagttatctaatttattggttattaaacatataatacgccaaaacatttattttggagaatataatattaattaaacaaaaaaatggcatcattaaaaataaagtatcgacattcctctatagaaggaaaagcgggaacattgttctatcaagtaattcataatcgtgtagcaaggcagataaattcaggatacaagatttatcctgacgagtgggatattttcaattcccaaataatcataccagcaaagacaggagaaaaccggcatcggtatttggtttctttaaaaaaatgtattgaggaagacacctcacgtctaaaagatattatgataagatttgagaatcttggatacaaatatacggcagacgaaatcattgaatattattccgctcctcctgtgaacgagtactttgtgtcattttgtgagaatctcattgaagaattgagacaaataggtaaaatacgcaccacagaaacttataccactacgctcaatagcttcaagcgattcatgaatttcagaaagaaaggcagagacatccctttcgacaatatagactccaacctgatgatggaatatgaacaatatctaaaatctaatgacatttgtccgaacagtacttcctattacatgagaaacctcagagccatgtataatcgtgccgtagaaaaagaattggttatacagcgatatccgtttaaacatgtatatacgggcatagataaaactgtaaaacgggcagttccggccaaaattatccgacagatacgcgatatggatttaagtcacgactcctctttggaatatgcaagagacctatttatgttcagtttttatacccgagggatgtcatttatagacatggcttatctaaagaaaagtaatttgcaaaacggttttttatcatatcgcagaaaaaagaccaaccaacagctagtaatcaaatgggaaaagcccatgcaagaaatcatagataaatacgataccataggttcttcttatctattgccgatcattctcgacgcaaaaacggatgaacggaaacaatacaagaatgcagcccagctggtgaattcaaaactaaagaaattgggaaaacaaatcggccttcctattccgctgacgagttatgtggcacgtcacgcctgggcttctatcgccagaagcaaaaacattccgttggctaccatcagcgaagctatgggacatgattcagaaagcactacacggatttatcttgcatcgttagacacctccgtagtggataaagcgaacagtattattttaaatacactttaattcacattataaaacagtttacgccataggtttcagcatacgtgcccaatcggcccgctgttattctatggcaattattatttttatttatctgacaaaaaataagttggaattatgttatacaaattgaagttttctttctgagagaaagatttgtaaatgcaaaagtacaaaagataacacaaaaaacactaaaaatcagaagaaaaatattagtcataccataaaaaataagaggtatgattagaaaaaactgattatttgttgagcaaattgattataccaatcttataaatatttgatatacatcaaaataccaatcaccccatttctctcagaaagagaaacaccgaaaataggagaaatttcctatacgaatgccataggaatataatgaacaagtatataccctatactttcagttgtatgacaagatggattcagaaaggaaaaagccccgtgaaagtacaaaattcttgcttgaaaaagattgaataaatgacggttttctccataagagaaatgttttgaatatgcaaaaatacataaattattgaacataatagcataaaacaaagaaaaaccttaatagccacctcgttaaatgtcgtggttacataacaaatgttgagtaaactagattgtatttacagcgaataatccctgtaaatcaattatatatgttaaatatttatgtcctctatttctcttatggagaaaaataggaatgcggcaagataaaagacggcatgaatggttgatatgacagccaaaaaagacataaattactataatacagaccaatacataagttggaatgaactatgggtatatcttgacctgccgtaataactaaaaaacacacgacgaatgagtactcccataaccacaagggaagatctaactagaatccaatggttcgccatgagcgcttataaaaacgagaaaaaggcggaagagatgctcaaaggcaaggatggtctagagtatttcataccgaaacactatgccgtaagggtctatcacggagtgaaatccaaaaggcttgtaccagtcatcccgaatctcgtcttcgtgcatgcttcccgaaaacagatcacggatttcaaaaaaaaatataatttcttacaattcatgatgtgggagaaaagcacgggactgaaatatatcgtggtgccggataagcaaatggagagctttatcaagattgcctcgcagtatgaagaaaacactatttattataaaccggaagagattgacatacggaaaggtacccacatatgtatttacggtggcaagttcaatggagtaaagggcgtattcatgcgggtgaaaggaaaacgtcgccgccgggtggttgtgatgcttgaagggattatgggtatatcggtagaagttcatcccgatttgattgaagtcatcaatgattccgattgtgacaaattttgagagatgacacaaaaaggagatgatgaagttccccttcctcgtggccttacacaaataaaataatatttgaatatatgtatttttggattgtaaattgttcactggcatttttgctttgtgttctctgtgcgggtatcgtcattccccagattctgctaatcgctttccgtaagaaattgttcgactttcccgatgagcggaaggtacatcattgtgcggtgccccgattgggtggtatcgcattcaagccggtagtgtttttcaccatagccctgttgctaggaatcaatatggtgctgggacattcggagatattgtccgaaatcgggaacgacgtgtgctctttggcttttgctttctgctccatcatggtactatatctggttggcatggccgatgacctgatcggtatccgttatcgtgccaagtttgtcatccagattctgtgcggcgtgatgcttattgccggtggggtatatatcaacaacctatacggtgttctgggcatccatgcggtgccgttatggttaggatatcccctgaccatcctgatcgtggtcttcatcatcaatgccatcaacctgattgacggcattgacgggctggcttccgggctatgcagtatcgcctgcctattttatggactgactttctttatgctccatcagtatgtttatgccatgctggcgtttgccacattgggagtgttggtaccattcttctattacaatgttttcgggaacgccaaacacggaaggaagatcttcatgggcgacacaggcagtttgaccatcggcatgatgctctgtttcctcagtctcaaactgaccatgtgcggactagacgataatacaggaaatgtacatccgatggtgctggccttctcacccttgctggttccatgctgtgacgtggtcagggtttacctgcatcgggtacgcaacggaaagaacccgttcctgccggacaagaaccatatccaccataagctgcttgctctcggaataaagcagcgcaataccatgatcatcattgtttccgtgtcaactatattcatactgctcaatattcttctgtccctttatctcaatgtgaactggatcgttttgggtgatatattgatatggactctcgccaacatcaggctgacaaaatctatcgcacaacttcaatcggaacagaaaaccaacaaataaaaatcaataaatatgaaaatcagatacattttatccttattaaccgtggcctttctattgggatcatgtgccacaccgaaagtcgcttatttcacggacctgaaacggggtaccgcagagcaagtcttgaacccgctggaaatccggatacgtccagaagacaagatttccatacaggtcaacagcaaagaccccttattaatgaaccttttcaaccttccgatcatatcccgacagattggtacgacatcaggtacatccaatagtcagggaatatcaggatatacaataaataaggatggggatattgattttcctgtgctgggacatatccatgtggcaggaatgacacgcgcggagatcgcctcgtatataaaagaggaattggtttcaaagaatctcgtgaaagaccccgttgttacagtggagtttatgaacctgaccgtttcagtgttgggcgaggttgccacccccggacgtttcaatatcgaaaaggacaagctgacacttttggaggccttaagcatggccggggaccttaccgtctatgggaaacgggaaaacgtgctggtacaacgggaggaaaacgggaaaaaaaccctgtatcaggtcaacctgaattcgggatatgacctttatgcctctcctgtgtattatttgcagcagaacgatatcgtttatgtggaacccaactcaatgaaagcacggcaggcgaccgtcaacggcaataacgtccgctcagcctctttctggatgtcattggcctcgttgctgacgaccattaccgtgttgattgtaaaataatatagaatcagatatgatgaccgtaaatcaaaagaatataaaaccggggcagcaggatgatttcctgcgaatacaggacctgttatacctgtgcctcgcaagatggaagtggttcgtcttgtctttagcggtaacgatcggtgccgctactgcctatctgttacgcactcctgccgtatatacacgtaccgcttcggtattgatcaaagaggattccaaaggcaagtcggtctcctcggatttggaatccttctcggagttcgggctgtttcaatccggtacaaatgtgaataacgaactcatcacctttcgatcaccgtctttaatgaccgaagtggttaaacggttgcgtctggatatgaattacttcgttcggggaaaattccaccgtcaggtagcctatggactgacattaccggtggatgtaacgataaatgacttgcctgagaatgaatcagccggttttacgttggaaatacagccggacggtacgttatacctatccgactttatacgtaacgggacagatcttgaagaaaaggacgtaaagggaagcttgctcgactccatcactacgccattgggaaaaatcattatccatacaacacccaattacgtgaaaggcgaggcatatacattatatgtaggcaaatccagtctgtataacgccgtcaactcctgctcgtccaatctgtccgtttcattgaacagcgagaaagcgtcagtcatagacttgtcattcaaggataactccacacagcgggcagaagatgtattgagcatgttgatttccgtttataacgagaattgggtgaaggacaaaaaccagatcgctgtcagcacctcaatgttcatcaacgagcgtctgggcgtaatcgaacgggaactgggaaatgtggacgaggatatctcctcttacaagtcagaacatctgttgcccgacgtgcaggcggcatcgagtatgtatatggctcaaagcagtgcggccaacgcgcagatcctgtccctgaacaaccagctttatatgacccgttacatccggaactatttagccaacgatgccaaccgtacccaactgcttccggccaactccggcattgaaagcgccaatattgaatcgcagattgccgaatacaacaagcaactgttgcagcgcaacagtctggttgcgaacagcagcacggaaaatccgctggtcgtggatatggatcaggctctggcatccatgcgtggggcgataatcagatctatcgacaatcagatagtgaccttgaattcgcagataaaaagtttgcggcagacggagcaacagacgacatcacgtatagcggccaacccaacacaggccaagtacctgctttcggtggagcgccaacagaaggtaaaggaagctctttacctattcctgttgcaaaagcgtgaagagaacgaactctcacaggcgttcacggcttataatacccgcattgttaccccgccacacggcagcatgttgccgacatcccctgtgcataaaaatatctttatggtcgcattcgctctggggctgctcattccgatagtcattatcttcatgcgcgagaatatgaatacccgtgtacggggaaggaaagacctggaaaacctgactataccgttcatcggtgaaattccgctgttcacaagaaagaaaaaagggatattaggaaagaaaccgcaggaagtcaaggccgttatcgtcaaggagggcaaccgtgacatcatcaacgaggcattccgcgtattgcgtaccaacctggaatttatgaccggcaaggacaagacttcgaatgtcatcatcatgacctcattcaatccgggcagcggcaaatcgtttctgaccatgaacatcgccgtgagccttgccatcaaaggaaaaaaagtgctggtaatcgacggagacctgcgccacgcctctgcatcatcctatatcgactctcctgacaagggattgagcgactatctgggaggtcgtatcgataatctggatgagatcatcgtacccgatccgaaacataaatctatggatatactacccgtgggaacgattcctcctaacccaacggaattattgttcgacgagcggttaaagcagacaatcgatactgtaagggagcaatatgactatgtgctgatcgactgtccgcccgttgaactggtggccgacacgcaaattattgagaaactggccgaccgtaccgttttcgtagttcgtgcaggattacttgaacggagtatgcttgctgaattggagaaaatctacgaggagaaaaaatacaagaacatgtccctgatcttgaacgggaccgagggaagtggcggtcgctatggataccgttatggctatcgatatggttatcactacggttacggctcaggataccactaaggttccgacggaaaacagggtggggataaatggatgattattaattaaaaaaaataaaatgttttatataaaaatactcgtatcattgtgtggccattcaggaaacgtatatcgctgaaagatagcggtatattcaagaattttaccgactgtcactcgcacattctgccgggtgtggacgacggtgtgcagacgatggaagaagcattggaaatactgcgcctgtatgaagagttgggcataaaatccgtatggcttacaccgcatatcatggaagatatgcccaacaccacactgcacctccgggagcgttacgctgaacttcaagccacctatagcggtccgataaaactgcatctggcctcagagaacatgcttgacaacctcttcgaggaacggttggaaaagaacgatctgctgcccttgggtgaaagcggtgaccatctactggtggaaacctcctactttaaccctccgatgggattgaacaacattctgctccgcatcaaggctaaaggctattatcccattcttgcccatccggaacggtatgtttatatgggtgagtcggattatcaacaattaaaagacatgggagtgaagtttcagttcaatcttccgtcaatagcgggtatgtatggcaaccggattaagaaaaaagccatgctgctattaaaagaaaaggctattactcatataggaacggacattcacaattacaatatatttcaaaagttcatttgtacgagtattacaaaaaatatacaaaactgtttaattgatagtcagactgttatagtttaaatagattataattatcggttattaagacctgtagattctgtttaactttttctctctaggtggatttgcataaaatacatacaaaaaaatccaacaggctggaattcaatggaaattgtaacaatcgacttggagcagatacacacaatctctcttttatccaaaccagtcttaaaataaatcattacacccctatcaagcaataggcttgcaacttcaacataaaacaacaatccatatgtcattaacaaaagttttagttactggtggagcgggattcatcggctccaatttatgtgagtatttattggctcacgactatgatgtaatctgtttggataatttttccacaggtaaacctgaaaacatttttccatttctacaacgatatccgaataagtttaaacttatcgtaggagatatacggaatctgaacgattgtaagaaagctgtagaaaatgtagattacgttatgcatgaaggagcattaggctcagttccacgttctatcaaagatcctataactacaaatgaaactaatatatcgggattcttaaatatgctgacagccgctcgcgatgccaatgtaaagcgttttatatatgcagcaagttcttctacatatggagacagtcagtctcttcccaaagtagaagatgtgattggtaaaccgctttcgccttatgccataacaaagtatgtaaacgagctttacgccgatgtgtttgccaaaacctatggaatggaatgtatcggcttacgatatttcaatgttttcggtcgtcgtcaagatccattcggggcatatgctgcggtgattcctttgttcgttaagaaattcatggctcatgagagtcctgtcattaacggagatggtgaatatagccgcgattttacttatatagacaatgtgattcaaatgaacatgctggctatgaccacgacaaatccgaatgcaaccaaccaagtatacaatactgctttcggagaacgcaccacattaaaccagttggtcggttacttgaaagaatttttgagtgaatttgaccccgaaattgccaacgtgaaaataattcatggtcccaaccgcttgggggatattccccattccttggcatgtattgataaagcaaaatcccttttaggttacaatcctcaatacagtatgcgtgacggtttgaaagaggctgtcaaatggtattggaagaatatttaaagtaataataacagatgaaattatgaatgaaactaaaatttgcgtaattggtcttggttacgtagggctccctttggctcgtcttttctcgacaaagtataaaacgataggttttgacatgaaccaagctcgtgtgactgctttgatggcaggtcatgatgcgacactcgaagtgtcagatgaactactccaatctgcccttgccaatggttttaagtgtactgccaatatagaggaaatccgtgattacaatttttatgtagttgccgttcccactccggtagacaaaaacaacaatccggatttgactccgctttacggtgccagcacaactgttggtaaggtaatctccaaaggggatattgtggtgtatgaatctactgtttatccaggtgttacagaagacgaatgtatcccggttgtggaaaaagtgtccggattgaaatttaatgaagatttctttgctggctatagccctgaacgtataaatccgggagataaacttcatacagtagaaaaaatcaaaaaggttacttccggttctacgcctgaaataggtaagaaagtaaatgaggtatatgcttctgtaattaccgccggtacacatctcgctcctacgatgaaagtagcggaagcagccaaagtaatagaaaactcacagcgtgatatcaatatcgcatttgtgaatgagctatccaagatatttactaaaatgggcattgatacacaggatgtactggaagcagcttctaccaaatggaatttcctgccatttaagcctgggctggttggaggccattgcattggagttgatccgtattatttggctcaatgtgcacaacgtcacggttataatcctgagataatcttagccggtcgccgaatgaacgacggtatgggggaatatgtggccaaccaagttgcgaaattgatgctgaagaaaggaatacaggtgctcaactctcatatcctcatattagggtttacttttaaagaaaactgtcctgatgtgcggaacacaaaggttatagatatttacaatgctttgcgagagtataacgtacatatcaccgtatatgatccttgggccaatcctgatatagttatgcgagaatatggaatctcggtaacgaaccaacatcctttggataagaaattcgatgcggcaattatagctgtagcacacgaacagtttataggctttgatgtaaaaacgttactaaatgctcaacacgtcatattcgatgttaaagctatctttgaaaaaaacgttgtagatggtagactctaatcggattgtctcctttgacatattgaaagggggaggaattttattggtcatccttggtcatatacaaatcccttacatgttgaaaaccgttatttacagttttcacatgccccttttcttttttgtgtcaggctgtttctttcgtccaatcagtttgagagagttttttgcaaaaaagaccagacaattactgattccttgggccttttttgcctttttgttgttcgcatatttgttcgttttgaaacttaacgaaactcataattgggcaaaagcgatctcgctccctgtaacgagtatgtttgatggttttctcggtgatgaaaactcttttattttatttcatgtaatttggtttttaatttgtttgttcgaggtttcattcgtttatttattgatacataaaatcacccctacaataaagcattaacaatcagcgcattatgtatattattatatggagtaggatattggttaaatgctaataacattgatttgccatattttattgacacaacaatgtctaccttgatttattaccatcttggtttttgcttcatgcggaacaaatggtacggcatgaaggtttcaccgatatactcattattcttgcttattatcgccattgttttcatcgttctatttccctcttacgttgacttaaaatcaaacaattttccattgcatctattgttgctttcaatggtttttattatgaatttttataggtttatcaattcatattttaattcgagaaagctgaaacttattccattggataaaatattgatttggtgtggaattaacagtttggcattattggggctacatatattatttgtagatacattctggatcgtgcgcaataagttacatcttgtaaactacagttggaccatattggaatttgcactcattgttgcaatatgctattttgcgacaaccttaataaaaagatacattccgtctgtattaggaagatcataagcttgctatgaataagacatcgtccgtaaataataaaaaaatattcaagaatacagtggcactttatgcacgtatgttgctgtccatgattgtatcactatatacatcacggatcgtgttaaatgcacttggtgtagatgattatggcatttatggacttgtcggcggtattgttgtcctatttagctttttgaatgtaacgatgagtggagcgacttcacgctttcttacagtcgaacttgccaaaaatgaccctcgacaactccaacaaacattcaatacagcctttatattacatataggaattgcaattatagtcttgtttttggctgaaacggtcggactttggctgttattcgaaaaattgaacattccagatgagagaatgagtgcagctgtttgggtgtatcaattttcaataatttcctcaatggtcagcatcactcaagttccatacaatgcgactcttatttcgcacgaaaaaatggacgtgtatgctattgtggaaattgttggatcactgttgaagttgctgatcgctacacttctacttattacagtatgtgataagctcattttatatggaggacttatgctcttatcttcattcttgattgcaatgacatatcgcatttattgcattaggcattatgacgaatgccggattaattgggaatggaataaggttatcggccgttctctgtttagcttttcaggatggaatctttattccaatatttgctttactactcgtcaacagggaacaaatatgttgcttaatatatttggcagtacagctgttaatgccgcagccggattggcaacaactgtgcaactgatgattgaacaagtatcaaccaatttggtaatggcttcgaggccgcaaattataaagcaatacgcattgaccgatttcaatgccatgatacaattactaaagcaaactacttgtttggcaaatgtgttatatctgttggttgctattccttttatctctgaaatacattatgtaatgaatttatggctcgtggaagttcctccatatacaattgaattctgtattttattgatagtctcaagcttcatatcattgaataataatattatatatattggaatacaagctgtcggacgtttgaaattttattcatttatggcggggacagtatcattatcagtcattccgatactttggttattgtttagtaaaggtatcggcttgacttgggcttttggattgcctatagtgagcacattattgatttatatcgtttgctcatatacactccatcattatgttgaagatttcaaaccgatacgttttttcttcacaacgatggtagtgaatcttttcataagtattccttcttttaccgcaatcctactcatacaacatatcttggttgagtcctttacaagagtgattatcgtggctcttagttcttcaataatattggttgttctgtcctattatgtgctattagacaaagaaaataagaaaaaagtaaaagcattgattttaaacaaattaaaacgatgaataaaaacatacttataattactcctttttttccgccacagactcatgctgcggtatttagggcatttaaacttgtaaaatatcttaaacgtacaggttggaatccgatagtactgacggttaatcgtaattatctatatttagaagatcctgatttgttggacgaagtccaagacgtgcctatttatcaagccaattatatagaaccgacattgcgcggccttagaatgttgcttggaggagaagatacttcactcaaagccattacagccaaagcaaaaactattggtgcacagtcaaaaagcacggatacagtcacctctaacaagcaatctttattcggtaagttttataaatatatactagaccgatggattcaagttcccgaccgctttagattctgggaaagaagtgccgtgaggatgggacgaaaaataattaaagaacatgatatatctatcatatataccacttgcctgccttttacctcaaatagaatcggtatgcgacttaaacatctaaccggagtaaaatgggttgctgatttcagggatcctaccacatacgctaagcgaatgtattctgattattttcctgtttttgccaagcaaaagaaaattgaacaagatacttttaaatacgctgatgctattactggtctgtcgggagcatacctgaatatatttaatgatttatatgagggacgatactcaaataaatcatattttattccaactggagtagatgatgattatttgccttcttttcaaaatagagaaaaagagaattatataatattcgtgggtgaatacctccatgaatataaagataatttcttgaaaatatttgccgaagctgtcaattctaaggaattaaaaggcaagggttgcacccttaaaattgtgggtaataagaatatcaatcaaaaacaaacggaagaatttgtcaatgatttgggaatctgtaacaacgtggaatatatcaatcatgtaccgcagcgtaaattgtatgaattgatagttaatgcaaaagcagcagtacttattcccggacacacggctttatggtggactaatttcgcaaaaatggtcgattatatcgcattacaagtgcctgtattagcaatggtgcccatgactagcgaagcacgaaccgaattgataaaagcaggcataggtatttttatagatactcctcagcaaggtgttactgtcatcaaacaagtatttagcgaaaaatttccaatgacggcaaacaaagaatattgccgccgttacttggcatcgcaacaaacaaaatctttcattgatattttccaaaaaatacaatagagatgcatatagcgtttttaactacagaatatccgatattgggtatgaaatgtggcggaatcggaatttttatcaaacatttgtctcatcttatcgttaagagtgagactggtgtgaaggtatcagttgtgtattggggcaataagtttacagaaactgtgtgggacgatggtatatctgtgatacctataaaccagcctcataagtctccattttcttcttttatcaatagaaggtatctaaataaaaagttaaatctattagtggcaaagattggcatcgacctcgttgaatctatcgactgggagggacctttggctttttgtagtttatctgtaccagtagttacaagattacatggttcaaatgtgtatttcgatcatttgtctggaaacaaaactccatggaacgtacggcttatggaatataatgctttgcgtaattctgatgcctatataggagttagccgacaggctctcgacctgacggataaattattcagtctgtcttcgaataagagaaaatgtgtaatatataatcctgtggatataaacatgccccctctttcatctagtgacatgaacaaaaatacaataacgatactttattgggggacaattgttgagaaaaagggggtacttgatttgcctcttattttcaacaggatatgcgagcaaaacgacaatgtcaaactcattctcatcggacaggatgcagtagtgaatggttcttcgacatgggaaaaatgcaaatctctcttttcaaagcaatcgatcggttgtgtatcgtatttaggtcgcttaccttatgacaagactatgtcatacgctaacagtgccgatatttgcatatttccaagccatgcagaaactttcggtttggtcttactggaggcaatgttactgcggaaggcaattgtttgttccgatatcgattgttttcaagagattataggagacagtaactgtgtttgcaaatgcagggtgaaacgtatcgatgaatttgcagaggctttgcaacggctaatctcgaatcccatttataggtgtgaacaagccgacagggcttatctaaatgcaactgctagattcaacaccaacgagatagtggcacaaaacatcgaattttacaatcgagttataagagatagctccaaacatcatgtagaagaatcctaactcaactgctttattagaaaatttaaacggactttttatttataaaatcacatattcatacgaaggggagttaaggctttttttgtattgccatcttgaagaaagtcaaacatttcagtacaactacgtaaaatatagaaatgcttcattatagtgaaatttctgatagagtataattcctaaacgaagtgattaatttcttaactcttgattcatattattcataaacgccttatgcaaaaagggataagcattattttgcccacacttaatcgggctgattatctggcaagtacagttgattgcttaatagagcaagattttggggagccgtatgaaataattattgtagaccaatcggcagccattgacagtactatgtatagtcgtgcaaaagatagtgatacattgattaagtactatcatgtgactgaatttagagggctacctgaagctcgtaatttcggtgtgcaacacacacaatacgcctacatcctatttctagatgatgatatcgagtgtgactgcaacctgctcaaagagcattacaagttcttgtcacaacctgatatcgcagtagtggcagggggaattacagaaaaatataagaataatcccaaatcgaaaaatgtaggcaagttccatttctatacggcaactccagaacggggattccacattaatcataaagaatatgtagatcatggcggaggtggaaattatagcataaaaaaagacatatttttagaagttggtggtgttgatgaatatttgaattatggagctgctctatatgaagaaaccgaaatatgtttacgagtaaaggaacttggatacaaagttttttttaattatgatgctcatgtatggcacttggctgctgatacaggcggttgcagggttctggatatcaatcgctatattgcttcattagtacataaccgggctttattgattagccgtcatctcaaatggtatcataggccgactgcttacatctatttgttgcgtcttgttgcatcatacgcttttacttaccgcaatcccggactgtttagactttttgcaaaaacttataaagaaggttataaaaaaggaaaactaactcctaaatatactcattatgcaaacatctaacaaacacatttttattgtaacctatgattatccaccaagtaatggtggtattgcaaggctttgttttgaactgaaaaaatatttagagaaaaaaggactgaatgttacagtcatttgtccccaaagtacttctaccgatgcagaggaggataataatgtggtgagattgcatggaagaagaggaatattggagttgcgtacattgaagtatttacgcaaaaaaactgttcccggtgatattgtaattaccgggaattatcatccagagggaatgctgtctctattgtcaaacagagaaacctatatattggcacatggagccgaatatcttgccggaaagagttttttccgacgctgtatttggcctacttatcgacgttttatactaagaaacgcctcttgcgtgattgctaacagtcattatacagagacattagtaaaacattgttctccaaatgctaaaacaatcgctattccgttagcggttgatgcaattcattttcgccctacttgtgaaaaatataaggatggcttgctacacctctgttctatttctcgattggaaaaatttaaaggacatgattttattatccggacgatagcttctttaccggcaaagtataagcaacaagtgcgattgcatctcggaggtaaaggaaaatataagagtgcacttgagcggatggttaccgatttaggattgtcagatattgtatcatttgaaggtttcattgatgataataaactttgcgatttctattcagcctcgcatatattcattctctgtacacgtgaagaagcggataataggaatgtagaaggatacgggcttgtttttgccgaagcgcaagcttgtggaaccgccgttataggtactcgtacaggtggcattcccgatgctgtcgaggagaataatggcggttggttgatacatcaggacgcccacgaagaattggagaatttactcattaagttaatcgacgataaatctcttgctataaatgaaggtcgtaatgcacgtcggcgcatagaagctaaaattacgtgggaacattatgtggaccaaatttgtgatgtcattttatgagtattagtctatatatagccttatattacaacttgttgctgctattagttgtttacatcgctattcaaccggtcagggcagaaacagtaagacagccttatatcaacaaccagatatttagccttgctttactcttgattgtatatgttcatgtaactttccgaccgaccgattatcactactttggagatacttcagcttatgccatggctttccaaaagaaagccttctatggtacggttgctataagagatagagatattggttttgagtatcttacctattggctttcacaactcgtcaatttaaaagggtattggtttgttctttgctcattatatatattgcctgttttctttgctttaaagaaacgattcaaacaacaatatgctgtagcactagtgttgttcgtttgttctttgagtttttggggatacggagtaaatggactgcgtaacggaatagctacatcgttagttatcttctcttttcttgttccaaacaacgatattaaacgaattcctgtttggattatagcatgtcttttccatcaatccgtcatgttgccaattggctgtttcttgctgacccgactttcaaataatcccaaacactacttatacttatggggaacgtttttcctgcttatgcttgttgcacgtgattctttctccactttgttgacaaacattccttggtttgaacaggataaaaggatgtctgaatatttgaatatgtcttataaaggcatggagcaaatgttctctaatattggatttcgctgggacttcattatttatagtttgatacccattatcgcaggagtgaaatatatctatacatattgctacgaagacaaattgtttatccgtttatttaatacttatatagcaagtaatgcgttctggctattgaccattcatgtaccgtataataacagatttgcttatctatcttggtttctttatcctatagtattgatatatcccttgctaaaagataacttaataaataaccagggagaacgaataaaatggattattctatgttattatatgttcacttatgtaatgtggataaaataaaatacaaaacaatagaaaaagatttttatgaaagatttagttactgtatttacaccggtatataataggaagaatttaattggaaatctatatcagagtttgttgtctcaaacctataaaaattttgaatggattattgttgacaatgggagcactgatgatattgatgaaattataaaatcttatcaaaatgaagatcgtatattaattcgtttcatcaaacaagagaatggtggaaaacatagagcaatcaacaatggcgtattacatgcaaaaggagaattattttatattgtagatagtgatgactatttaacaaaagactctatagaacgaatagtttttcattatcaatatataaagaataatgataaatttgctggagtttgtggtatgaaatgctttccagatggttctcgtatagggaaagaggttacatggaaaattttaaaagattcttggattaactattggattataaaaaatataaaaggggatgttgcgtttgtttttaaaacatcagtcctgagaaattatttatttgacgatatacccggagaaaaattttgtgcagaaagtttggttctaaaccgtattggaaaaaattaccttatgttattttttaatgaaaaaatatacatcgcagagtatttatcagacggtttatctgtttcatcaatcaaaaacagaatgaattcacctaattatgccatgagaatttattcagaaatggcatcactagatattccatatttaaaaaaaataaaagctcatataaattactggcgttttgctccttgctctaaattgaaaatgaaaaataaaataaaacaaataggaatttctagttatattatttttatgcctattggctatttgtttcatatgaaagataaaaaaaacaattatatagatattagacatgtcggatctaagcggtagaactttatttaaacggattaaaccattaattaaggtattcgttatagtagattcatatcttcctaggaaacttaataattttttatttgtaagtttaagaggtattggaggaaaagttggtattgtgattagatacatattggtgaaaaatctagcaaaaaaatgcggtgataatgttgtaattaaagaaaatgtatatatatctaacatagagaaactagaactgggagataatatcagtattcatccgatgtgttattttgaatgtagcggaggattgatgatcggaaataatgtgtctattgcccattcaagttcaatactaacaagtactcacacttattctgattttaatttacctattaaatataatgaaatcctaaaaaaaacggtagttatccatgatgatgtatggattggttgtggagtgaggattttatgtggagttcacattgatacaagatgtataataggcgcaaatagtttggttaataaaagtgttgactcattctctatttatgggggagttcctgcaaaaaaaataaaatcttttcaatgaaaaaaaagaaattattcaaaataacaaattcagcttattttcaagtccggcaacttcaaggtcaattgaattatttttccgcatatttcgatgtcattgccgttgcccctaaaggagaaggttgggaggaattacagaagcaacaggcacgttgtattccggtaaaaatgtcaagagccataaatccgattttcgatttaataactcttttccaattggtaaaactttttatcaaagagaagccgactattgttcactcgcacacccccaaagctggtcttttgggtatgttagcagcatggatagcacgtgtgccgatccgtatgcacacggtaacaggcttcccattgacgacggctacgggcataaaaaaacaaattcttcgttttacggaacggttaacttacgcttgtgccacaaatgtatatcccaattcacaaaagatgtgtgatattatttgttcaatggggatcggcaatcctaaaaaaatgcttgttatcggtaatggtggttcaaatggaattgatacggcattctattcgcgaaatgctacacaagatattaagatttcaactttcgatttcacgtttggttttgtaggtcgtatattttatgagaaaggaatcaatgaattagtagcttcttttattcgattacagaaagattatcctaacataggattacgtttaatcggctttatggaagaaaacctttatccggttgatgattgggtaaaacaagagattagcacaaattctcacattgagtttgtcggctttcaacaagatgttcgtccctatctaatggggtgtgaggcttttgtttttccctcctatcgtgaaggtttccctaatgttgtcatgcaagctggggccttggaattaccacaaatcgttacagatatcaatggttgtaatgaaataattgttcaaaacaaaaatggaataattgttccaccacaagacgaacacgcattgtataaagccatgaaatattttttggataatcctaatgaggtaaaaagaatggcaaagaatgcaagggcaatgattacatcacgttacgaacgcaataaattttggaaattgatgcttgaagaatactatcggcaaattaaaaatcgaattaaataacatctatgcaaatcatactgttatccggcggttctggtaaacgcctatggccgctttccaataatacacggtcaaaacaatttatcaaactgttgactgcgcccgatggctcgaaagagtcgatggtgcagcgggtggtacggcaattacgagaaaccggcatctgtgattcgattactgtggcaacaagccagtcacaacgggatatcatcatcaaccagcttggagaagagattcctgtagttacggaaccggagcgtcgcgatacattcccggctatcgctctcgcaagctcgtatttggcctacaaacgaaaatgttccaccgatgagattataatcgtcatgccttgcgacccttataccgaaacaggttattttgaaacgattcgcaggatagcggatgcagtgaaaaacaatgtagccgaactagtattgatgggaattaaccccacatatccgtcagcaaaatacggatatgtagtgccagtcaatgatgtacagaacaaaggaatatttcaagtatcacgctttacggaaaagccagatatgataactgccgagaaacttatttcagagggtgctttctggaacggaggcgtattcgcttttcggttggggtatatgacagatattgtaacccgacacatcaaaaccgacactttttcagaaattcgttctcgctatggggaatttccgaaaatcagttttgactacgaagtcgctgaaaaagcgcagtcggtagccgtcgtaccttttgccggagagtggaaagaccttggtacatggaatacgttgactgatgaactatcggaacacaccatgggcaatgttgtcatggatgaagaatccgaaaatacccacgtcatcaacgaacttggactgccaatcatgtgcattggcacacggaatctagttatcgcagcatcaaatgatggaatcctaatttcggacaaagataaaagcgagaacatcaaaacttacgctgactgcctacaacatcggccaatgttcgaagaacgtcgctggggtgaatacaaagttgtcgataccgccgagttttccgacggttacaaatcacttaccaagcaactgaaaatcaaatccggtaagagtatcagctatcaggtacaccgccatcgcgatgaagtctggacgtttatcgacggcgagggagaactggtactcgatgatatcaggtcggttatcagcagaggcgatacgattacaatcaagaaaggtgttaaacatgcagtcagggctatctctgaattgacgttcatcgaggtgcagtccggaaatctacttgcagaagaagacattgaacaatttgactataaatggtaaaatccttcgttaaaacctctgacaaaagaatgaagttggtttacaagaaagttatcgaacctcaattaggcaacctgatatccatattgaaaaagaaatgataatctatagcattgattattatcaacaagatcaagattgtactcaatgtggaaaacattcggaatgtatttgccggtaaaatgataaaatatcactatccatatgtaagtaagtatatataccggacacaggatcttgcgaaagtagcttcgttttcagattctaaaccgcagaaacagcattacgcaaaaattaatgggttggaaaaacttattataaatactggtaatgaaccttttcattgatttttctaatgaaaaagaccatccttcaatacatgaccgatatctatcaggaagatattcccaaacatatccttcaagaaaacaagatacgcctgaattcttttttcctggaacaggaatccgtacagaagaaagggactcagtttatattcagatatgcattctactccgttgagaaaccccgaaagatcacgaagcagcatctattgaaagaatatgcaggggtgcctttggaaaaaaggagcgtacaaccggaacaaatacccgatatgaagcaatatagtgatataatactgtatggagatgccagctctcctgaagcacagcaacagctggcggaatacctccaacaacataattcattaaaagtccagttgtctttttttgacaagagaaatgattccactagcaaggatgaacaagccatcgcatatgcggaactacagaaggcgctatttttttgccaaagaaaaaagatacctctcctgttcgtttccttaaaagggatgatagacgacatccgttttctcaatctgctggaggagagccatgtcgatttcagatgtatcgattttccatggttctgcaaggagaatctgcctctgataaaggcagttgtgctatatgaaaagttggaaataagaataaatgtataagatatcaagcttacagattggacttcaatgttgcagcattgaggtttatgagaaacaattctaaatatatttctgtttggcgaaatcttattctaaaaggaactctaaataaaagaatccaccttcagatatctttcttcacttatcctcaaagtatataatccaaacataaatatcagacctattttccctataactgagtaataaaaagattattccccaacaccgtaaacaaagaaataacagaagcactttaaaatggtgtatctaactcacttttttaaggataatatccctgttacagttatctgtagcaggtgatcctttcaaattgggcattagatgcacccttttccttattccaacaaatgcgcctcttgtaacctcaccaattcccaatacatcttcaaaaacatctccagatacaccttcagactcgggaaatagacgaaagacttccagcaaaagaaaggcacatgaatggccgttcattcggaacctccatttctggatagcgtttctttgtccatccaaaataatctctatcgggacagaacaataaacaaaagcataaatatcaggcaaaattgtcccgataaaagaattataacatgactattgaagatgaaatcctccaatacctgcactatcatcctctatcaaacagggttgagataacgcttgggataaccaatcctcccagtggcaggattgtaaaaagactactggccgatgccgtaaccaaaggaatgatagaagtactctaacaatagtagtgccactattttataagcagcactgcaattgttccttaccccagcaaatgcacctcctgtaacctcaccaaccccaaatacatcttcaagaacacctcctgatacaccttcagatccgggaaatagacgaaagacttccgggcaaaagagaggcacgtgaatggccgttcattcggaacctccatttccggatagcgtttcttcgcctggtcaaccgccatcttgttcagtgaagccacgaagttagcctggcgtatcggattccatttcggggtttcaagaatcaccatcccatctttccgctcaggaataaccaaatattcatcctgcacgttacggacgtaatagcacacaaaagacaaggcctcatagacattatcccctacatgaataccgataacccgttcttcaaccggtgtaccggcaaagcattccgcaatctgtttcatggcatacccatgcaacaaggcagcatcagaagccaacagataagccggtgcggtacgctctcctcccttatcgatggcagcaaagacagaaggactccaacagagatggatgagctttcctttttctttctcacgaagggaagcgacacataaacggttatcaaagaccaaacgggcttctttcgtttccggatggaactggaacacgttccgtaccctgtccggcttatggatatccatcatcagatagccctgccaaccggacacgtgctttgtcttcaagacggtttcgctttcctccacatcgaaaagataagacaagagcttttctcgcttacaacatacgaagagagaaagctcgtcctgttctttcatctgctgcatatccaaggaaagaacaaaagccaattgccaaggagtaagctcggaaaagccatgtaattcaatacaagacaacgcatccttctccggtgagtaaacgacatatccccggccacctatctcatatctcaacatgaaatccccctgttcagtgggatgataattctgtaaaacggtctgataattcataaagcaaatatattaagttagtattcatcataatgagaaatcgggaccactcttgcgtttccgtttctttttggacggtatgagatcatcctcttgcgacttcttcccgctgccggtaatgtcaagttccggaatggccataactcccccaccctgcatatagaaagcctcacgatccacccgctcacggaactcccctaccctatcgatatgtggcgagagaccgacagccacaccatcgaaatgcttctggatattctgataagtgagcttacgggaaagatccgcacctttaaagacatgagcattttccacgttttccatataaaaggaaatcccgtatgcgcctttgctgtttacatgttccgtcacacggatcgattcttccgccaaccttttcttaaaatcctcatagcctaaagaagcgttcaatgccttaaacacatggtcatagagataatgcttctgttcatcggcgctcatgccccggccatcaaaacgaatattaccaaaacgatatttctgaggaagtgaaacgtccttcaggtaaaagcctgaatccttgatgccatagacataataggatttgtccttcttggtgaccagacgcatatacaatccttcttgttccaggttccttcggaaatcggatgtactttcggaaaaagagtagatgcggtcaagctgttgtaacagttcatccttgaacaaggggttgaaaaaacctcctttttccagcaatgcgaaaaggttgtcatagctttcatcccccaataggacacgccattcttcattggccaattttatttcttgcaagggtttattcaaagaccggtatgtatcggattgttccaggacagccgataccttatccttgtaattataactacgcatggctttcttcaaggccgcatcgaaataatagttacggtattgcgcctctcccaacgtggttctcttgcctccttccctttccaaaggcaacagaccgtacttctgctccagttcccttgagatcttttcggaacggctgtaattatttccggaaggaatgcttttgccttcttcatcaattgtggtcagcagcacatgcacatggctgtgtgccttgtcggtatttaggacaacggcataacaggactttccgtaccccatcctctcgatatattccccggcaagagaaagccactgttcatcggaaaggctttctcccggatagaggctcagaataaattccgcataaggtagtttcacccggtcattcaactgggagataagtttcatgtaggctggcatggcggccagttcgtcaccagtggaggtgtaaagcacttttccgtttccttccttgaccttggaaagctggtattcaattttccggctcatggacaggtgggatgagaaagaaggttgtatctcggctatcataacaatttccggttaatggtttctacatccgaaaggtattggttaatccgatccaatgaatacaatatattttcatcggacggaagcgtattgatatgtttggcaagctggttgatattggctcctattttacgaagttcatatatcatttgcacatcggttttcgatatgcttctgcctttcaaggcagactctctgataaaggaagaaagggattttccctcttcctttgaacgttgaagaagctgttctttctcggcttccgtcaagcggatctttatacttatatctcgattctctttcatatatacagagtatgtgagtgtaacgaacattggtcggcagctcggctgtcgcaaggttttttgtacccacaaaaacataccttgcattagcaaagatatacaataatactcagctgtgaaacaaaaccagacaaaagtcttgatttcttaatccagattaaccgctcactttgttacaaagtaactacgcacattgtaacaggcgaacggaaagccattagttacaaaatacataattactaattatattattacaaagtatgaacatac

SEQ ID NO: 612 - DNA, 8508 bp, Bacteroides caccae
  source 1..8508: mol_type = genomic DNA
gctgaaaagccagtacctctttatcttttgcggcggcttgctcgccgtcttcgtggtgttcatcgtcctgttcatggcaggcgtgaaccagtggctatgtatcggtttcatcgtgtcggcttcgctgctgctcgtgtggcagacgttccggctcaatgccaagtacggcacgcacgggctgatgaaagctgccgcacgcaaaagacacccacgcttcattattagccgaaaggcgataccccggctgttcaactacaaaagaagaaaggaagaaagaacatgaggaatatgttaaaggctaccacgctggaaaggaaatttccacttttggcggtggagaacggttgcatcatttcaaaggatgcggacataacggtggctttcagggtggaactgcccgaactgttcaccgtcaccagtgccgagtacgaagccatacattcggcatggtataaggcaatcaaggtgctgcccgactactccatagtacacaagcaggacttcttcatcaaggagaactaccagcccgacacggaaagggacgagcttagttttttaagccgctcctttgaacggcacttcaatgaacgcccgttcctgaaccattactgctacctgttcctgacaaagacgacaagggagagaagccgccgacagagcgacttctccaccctctgccggggcaggattgtaccgcaggagatagccgacaaggaagcggcggcaaagtttatcgaagcggtcgggcagtttgaaaggattatgaacgacagcggttttgtcacccttacccggctggcggcatcggaaatcaccgggcaggacggaaaggcgggcatcatcgagaaatacttctcgctctcgcaaaccgacactacttgcctgaaagacatcgggctgtacccggaagaaatgcgggtcggggacgatatactgtgcctgcacacgctttcggacgtggaagatttgcccggaaaggtcgggacggactgccgatttgagaagctgtccacagacagaagcgattgcaggttaagttttgccgccccggtgggcgtgctgttgtcgtgtaaccacgtctataaccagttcatcttcatagacgaccacgccgaaaacctgaagaacttcgagcagaccgcccggaacatgcaatcgctctcccgttactcccgtgccaaccaagtgaacaaggagtggatagacgagtacctgaacgaagcgcacagcaaggggcttatctcggtacgctgccactgtaacgtcatggcatggagtgacgatagggacgaactcaaacgcatacgcaacgatgtgggaagccaacttgcgctaatggagtgcaagccacgccacaacacggtcgatacgcccacgctcttttgggcgggcatacccggcaacgaagccgacttccccgcagaggaaagtttctacacgttcttggggcaggctctctgcctgttcgtggaagaaacgaactacaagagttcgctttcgccgttcggcatcaaaatggtggacagggtaagcggtcgcccgctgcacatcgacatatcggatttgcccatgaagaaaggcatcacgaccaacagaaacaagttcatacttgggccgagcgggtcgggtaagtccttcttcaccaaccacatggtgcgccagtgttacgagcagggtgcgcacgtgctgctggtcgatacgggtaacagttacttggggctgtcccagcttatccacaaccgcacgcacggcgaggacgggatttatttcacctacaccaacgagaacccgatagcgttcaacccgttctatgtcgaggacggggtatttgacatcgagaaaaaagagagcatcaagaccctgatactcaccctgtggaagcgggatgatgaagcccccaaacggtcggaagaagtggcgttgtcaaacgccgtgagtgcctatatcgaactgataggcaaagaccgttcggtaacgccctgcttcaacacgttctacgagtttgtccgggatgattaccgccgacagcttgaacagaagaacgtcagggaaaaggattttgacattgacaatttcctgaacgtgcttgaaccgtactatcgtggcggtgagtacgactacctgctgaactccgacaaggagctggatttgctgcataaacgcttcattgtctttgaattggacaatatcaaagaccacaagattttattcccggtaacgactatcatcatcatggaagcctttataaacaaaatgcgcaagttaaaggggataaggaagttaatactaattgaagaagcgtggaaagcgattgcatcggcgaacatggcggactacataaaatatttgtacaagactgtccgaaagtatttcggggaagcgattgtagtcacgcaagaggtagaggatattatttcttcccctatcgtgaaagaaagtatcatcaataactcggactgcaaaatattgttagaccagcgaaaatacctgaacaagttcgacagcatacagaacctcttgggactgaccgacaaggagcgttcgcagatattgtctatcaacatggcgaaccaccccggacggaagtacaaggaagttttcttctcgctgggcggcacacaatcggcggtgtacgccacggaagtttcattggaagaatattacacgtacacgactgaggaaagcgaaaaaatggaactgttcgctcttgccgagaagctggacggcaaccttgaactggctatcaagcggcttgcagaaagcaaaagaaatccccaatcatcaacaacttaaaaattaggaacatgaaatggattgacaatctgatatacacgctattgtccgcctgcctgctggcgggctgcgaggacagcggaagcaaggagctggaaaggatgcagggctattgggtacacgtcaggggacacccggctttcacactctcggaaacgggcggcagatacaccgtcacccggaaagcgaatgtcaggggcagaatactggaaacggcttacccggtaacagaacggaacggctgcctgttcatcgaaacgggcttccgcatacagttcacctatgacaaaaagaccgaccggataacgctcatgcccggcggcgaatacaaacgagttacaaaccctgaaaacaaaagataatgaaaagaacaattctccttatggcggtgtgcctttgcttcatcggcaaggcatccgcacagtgggtggtgtcagaccccggcaacttggcgcagggcatcatcaacaccaccaagcagatagtgcagacttccaccactgccaagaacacgctggacggcttcatggaagcgcagaagattttccagcagggtaaaaaatattacgatgcgctcaaagcggtacacgatgttgtcaagggcggcatcaaggtgaagaagtccattgagttggtggcggaaatatccgaaatctacgtgcgaaactatcagaacatgctggcagacccgaactacacgccggatgaactcaccgccatttcagccgggtacgcaaagctgctctccgaaagtgcggacgtgttgcaggacttgaagaatgtagtgaacgtgacgggcatgtcgctgacggatgccgaaagactggcggtaatcaacaacgcctataaaagcctgctcaactaccgcaacctcgtgaactactacacccgaaagaacatatccgtgtcctacctgcgggcgaagaagaagaacgacaccgaccgggtgctggctctctacggctcggcggatgaacgctactggtaacatataaatcggtatgcctatgttattagcagcggtggattttgacaacctgcaccaagtgttgcgggtgctgtacgatgaaatgatgcccttgtgcagcaacatgacgggggtagccaaagggatagccgggctgggagctttgttctatgtagccgccaaagtgtggcagtcgctcgcacgtgccgaacccatagacgtgtacccgctcctgcgtccctttgcgctggggctgtgcatcatgttttttccaactttcgtactggggactatcaacacggtattgtcgccagtggtgaaagggtgcaaccagcttatggaaacgcagactttcgacatgaacgagtaccgggcgcagaaagaccgactggaatatgaagccctgatgcgaagccccgaaacggcttacctcgcatcggacgaggaatttgaccgacaactggaagaactgggctggtcgccctccgacatggtgaccatgacgggcatgtacatggacaggacggcttataatataaagaagtccgtccgggactggttcagggagttattggaaatgctctttcaggcggcggggctgattatagacacgctgcgcacgttcttcctaatcgtgttaagcatactgggtccgctggcgtttgcgatttccgtctatgacggtttccaaagcacgctgacccggtggatttcacgctatatctccatttacctgtggctgcccgtgtcggacttgttcagcagcgtgctggcacgcatacaaaccctgatgctccaaaaagacatcgagcagctttcagacccggatttcatcccggacgggagcagcaccttgtatataatctttatgattatcggcatcgtgggctacttcaccattccaacggtggcaagctggatagtgtcggctggcggtacgtctgcctataaccgcaacgtggcacgagctgggtcaatcgccggggctgcggtcggtgcggcaagcgggaaagtaaccgggaaactactcaaataaccaacatcaatatttagtatatggaatttaagtcattaacgaacatcgaaacgagtttccggcaaatccggctctttgcgctggtattcatctgcctgtgcgcactggtgacgggctttgccgtgtggaactcgtacagcttcgccgagaagcagcggcagaagatatacgtcctcgacaacggcaaaagcctgatgctggcactctcgcaggacatggcacagaacagacccgtggaagcgaagtcgcacgtgcggcgtttccacgaacttttcttcaccttatcacccgaaaagggggctatcgaaagcaacatcaaacgctcgttgtttctcgccgacaagaccgctttcaactattacaaggacttggcggaaaagggctactacaaccgggtgatttccggaaacgtcacgcagacggtggagattgacagcgtgaagtgcgacttcgaccagtacccctacaaggtgaacacgtatgcccgccagttgattgtccgggaaagcagcctgacggtgcgaagccttgtcacctcgtgccggttgcttaacgcaacacggagcgacaacaacccgcacggcttcatcatcgaagcgttcaccattaccgagaacaaggatttgcagaccattaaaagatagccttatggaaagaaaacgaaattacatcgaaaaggtgcaggactgggcagacgaccgcctgcgccgaatgtgcggacggattacgccgggcaaaaggctggcggttatcctcctgatgttcttctttttcggcggcttgtctatctacatcaccgtttcatcaatctacaatatcgggaaacgggacgggcaaaggctgcaaatagaacacatcagacaactgccgttgcacggcaatgacacaaccaaaagtatcaacccgttaaacagaccgcaatatggaagacgtacagaagaatgagaacggcacgaccgcacagcaggcggacgggaagccgaaaaaggaaaataagcccaaacgggaacttaccccgcagcaggtgcagcagcgcaggaaaatgatagtcttcccgctgatgttccttgcctttgcagggtgcatgtacctgatattcgcaccctccggcaaagaggacgtgaatgtggaaagcgtgggcggcttcaatgccgacatacccctgcccgcagaggacgggattatagccgacaagcaaaaggcttacgagcaggcggtgacaagccgcaaacagcaggacaagatacaatccttgcaggacttcggtttcacgctggatgatgatacggaagaaccacaagaggaaatcaacctgctgccggaagaagatccgaagccacaaaggggcggcggtgcttcttcaagggcggcttaccgggacatcaaccgccagttaagcacgttctacgaaacgccccctgtggacgaggaaaaagaggaattgaaacggcaggtggcggaactgaccgaccgactgaaacagcagcagaacgccacgcctacggctgacgaccaaatggcactcttggaaaagtcctacgagctggcggcaaagtatatgaacgggcaggacggacaaaggggacagattgcccaaataccgacagccgggcagaacggcggcggtatcggcactccggctattccggtgcaggctatccgggaaacgaccgtttcgggattgcagcagcccatgagcgatgccgacttcatccgggcttacagccagccacgaaactacggcttcaacacggcggtaggcacggggtacgctatgggaaagaacacggtagccgcctgcatacaccaagaccaaacgctggtggacgggcaggcggtgaaactccggttgctcgaacccatgcaggcgggaaatatcgttgtgccgaagaatacccttgtggcgggaacggcaaaggtgcagggcgaacggctcgacatactggtgtcctcgattgagtacgctggcaacatcatcccggtggaactcgccgtgttcgacacggacgggcaaaaggggctttccgtcccgtcctctatggagcaggaagcgttcaacgaagctatggcgaatatcggaagcgggctgggtacaagcatttcctttgcccaaagtgccgggcagcaggtggctatggacgtgacaaggggattgctgcaaggaacgtccggctacctcgccaagaagttccgaaccgtgaaagtgaagctgaaagcaggctataaagtcatgctgtatgccaaacaacaataaccattttatcaaccgttaaaatttcaattagcaatgaaacagatttttggattgttcgccctcttgctgggcgtgtgtgcggcaaacgcacaaaccgctgacaccgtgaagtatgcggctggcaacgacttgtaccgggggattacccggaaactcccgtaccgccaaatggttacgccctacggcgtggaagtgacctttgccaagacggtgcatatcatcttccccgccgccgtccgctatgtcgatttgggaagcaaccacatcatagcgggcaaggcggacggtgcggagaacgtaatcagggtgaaagccacgacagagggctttccgggagaaacgaacttctccgttatctgcgaggacggcagtttcttttcgttcaacgccaagtacgcccgtgaaccggaaatgctcaacatcgagatgaaggacttcttggagaatgaagatacgtccgacttctcacatacccggatgaacatccatttccgggaactggcgggtgaaagcccgctattagtgaagctgataatgcagagcatctacaagaacaatgaccggaaagtgcgccacttgggtagcaagcgtttcggcatacagttcttaatcaaggggatttacacctataacgggatgctctacgtgcacacgcagacaaagaacagttccaacgtgcctttcgacacggacttcatcaggtttaagataaccgataaaaaagtgcccaaacgcacggctattcaggaaacggtactggatgcggtacgcagctacaacgaggtgatagagattgccgggaaatcgaccgtgcgcacggtgtacgccctgccgaagtttaccattcctgacgacaagctgctggtcgtggaactctacgagaagaacggcgggcggcatcagaccatacgggtggaaaacgccgacatcgtgaacgcagaagtgattgacgaactaaaaatcaaatagggaatgaaaagacacatctttataatgatgctctttgcgctgtgcctgacctcgtttcaggcacacgcacaaagatacctgccgggcatgaaaggcttgcaggtcacggcgggcatgacggacggggtgcattggaacgctggcagtgatttcgcctaccatatcggggcggcgtacagcgtttacaccaagaacgccaaccgctgggtgattggcggcgaatacctgcacaagaagtatgactacaaggatatgcagatacccgtagaacagttcaccgcagagggcggctattacctgaaattcctatcggacagacgaaagacctttttcctttcattgggcttgtcggctctcgccgggtacgaaacaagcaaccgaagcgaaaagctgctgccggacggctctaccttgctggataaggactgcttcatttacggcggtgcgctgacgctggaactggaaacctacctgaccgaccgggtggct

SEQ ID NO: 613 - DNA, 4785 bp, Bacteroides caccae; identical to SEQ ID NO: 6
  source 1..4785: mol_type = genomic DNA

SEQ ID NO: 614 - DNA, 4416 bp, Bacteroides caccae
  source 1..4416: mol_type = genomic DNA
atttttaatagggaagagggctttttgttacttttgttgtgtggggtagtgaggaattatgtatatttgctgaatataacgatttatataataaatgaatggattgtttagtaagtgtaattgtccctgtccataacacagttgagtatttgcctaggtgtattgattcgatacgtaatcaatctttgaaagatatagaaataattctagtagaaaatcaatcaaatgatggctctgccgcattgtgtgatgaatatatgtcttttgattctcgtgtgaaagtacttcatcttccggttgccaatgcatcaatagctcgtaatgcaggactagatattgcttcagctccctatgttggttttgttgatagtgatgattatatcgattataatatgtatgaggagttatttgatgtgataaaatgtcatgatgttgatattgtctattctaattttcagactgaatatttggatggtcgaattgaaggatgtgataaaaactccggacagatatatatacgctcatcgttggatgtattaagagatatgatgtgggataaattgaattgttcgtcttgtacaaagctttttaaaagaacagtcttttcagagtataaatttccagaaaataatatttatgaagatagaattgcgatgcatatgtggatattgcaatgtaagcaggtagcttgggttgataaggtgttttatcattatgttgaacgcagtagtagtatttgtcatttaattactcctttgaatagatatcattattttatggctgaattttctcggatagagtttatagagaagcacttattgtttgaaggagaagaattattggaagtaaggaataggcttattcgtatatgtttttttacttttgaggagtttgtccttttgacgaaaccgaggtgttttcagaagccaataaagcatatgagagctaaatttaaaacattattaaaatttccttctcgagagttagaagttttttatcgcaaacgaataagaaaaattgtctatttttggccaatatattattggcgacatttttcctgattagaaacaactggcagggtctagtatgtaggtattgatatatgtaaattgaggttggacgatgtagtcggaggaaaactgacgaattgtatgtcctaaatgttgataatataaatgtaatatggataaattactaccacttgtgtctgttattgttcctgtttacaatggggaaatttttctagaaaaatgccttcaaagtgtaatatgtcagagctatacaaatattgagattattgttgtaaatgatggaagcatagataatacatcattgataatagatcgatatgtaaaattggataagcgtataatcgggttggaacagaaaaatggaggacctgccctagctaggaataaaggcttgaaaatagctaaggggaaatatgtgcaatatttggatagtgatgattgtctgcatgaaaaagcaattgaatatttgctagataaagcggaagctagcaatgcggatattgtagttgcccctttccagttttgttatttagatggtacctcttataaatcgtcgttttttaatttctcaagtatgtctggtattgattaccttaaagaaatattaaataataaggcttattggagtgtttggtctaaatttcataaacgtgaattgttgttgaatgacccaatggagatatatccaaatatatgttttggggaggatgtgatttggagtgtgcagttgcttttacgttcaaagaaagttgtttctatagaatatgttattttagattataatattcggaatctttcactttctcattcttgcaattttgatgaaggcaaatttgcgaattttgaattttatagaagttggttggaactttaccttgcacaaaagggagtgatagactttatgaaaaaagacttggcattttttcatattagaaatactttccaaaaaattgtttggaggaagatacgtaatttgaaaaaagacatggatagaataatacaggatttgagatgctttcctgaattgaagcaatcaatgtctaagcgtgaattgagggtggtttctgctttccgattttccatgttgtgggggaacttaaggttgaagtactatattcaaaaaggtaaaatttaggtgtactaaaatattattatggtgcttgaactatgaattgtggcacttgtaaatgctagtgtatttgacgcttttattggttagatttaaggagggagattagctgcttaattgaagggggtccatatctcattttttttctgttcaattctttttttgtgagaaataatattgttgatttttaaaagaaatgatattaattttctaatccttttcttaaatttttttgtttgtgatattggctgtatgaaaggagcaagttcggaaatacgatactcgtatagctcagataatgcatctaatatggctttcggaaacttgcttttgatccattttattcgttcttccattaatttttcttgattggtactgatcccattcccgtctacttctgctattacaatgtctatatatttatagctgcaatcgttaaaaataatactttccattgtatgtatccagtctgatatgattttgtattcagtgttatataattgtttctgaaatagggaatggtgaatgaagcaagcttgatgtggtaatgctgttttaagaaggtaaacgatatctaatgtttcagagggggtaatatatctgtagtctttttctgataatatgtattttatatttccatatatatatttattaccatctaaagctatttcctgtagtatggtattgcttattaaggtatctccagaatttagaaaaaacagatactctccatgcgcttgttttatacctttgttcattccgtcataaatgccattatcaggctctgatacccaataaagtggaaatgtaatttctttttcatatagtaggattgcgtctttacttccatctgtggagttagcatcaatgatgatatgttcaaaaaaaacgctttcttgatttttgatactatttaaagttcggataagtccacttttgttgttgtagtttacggtaattatgcttagtaatggagcaatcatgttctaatcttataaaattatatgctatgttggctgtatattctgcaaatatacatatatttgtcattaatacgaattaaagttaatgcttttaaaatatgttgggtgatttgaagagaaatatctataaatatttgctgaatagaggactgttacgaactaaaattgttgtattgatggacggtggtatttgttcgcagatgcatcaatatttattgggaaatttatatcgtaaaagaggtttttcagtgtgttatgatttgacattttataaggaatggggattagatataaacaatgaatttgttaggaactttgatattttgaaggctttcccgtatttggagtttgaagaagcgtcaaaactggaagtggatgtatatagaagagaatacttttatgggggcaatgatggtgatattcgtactaatgatatgtcatttcttagtttggttccacctatatatttaggaggatattatcatttcccatcaaagcagtggcttgaaacttttcaatctttatatagaatggttgatggtgttctcgataaagttaatcagataaaatgtttagaaatagataagtgtgtagattctgttggagttcatgtcagaagaggagatttaaaggaagaagtatcttcttatggagcgccagcttcatttgattattttataaatgctacggctttctttaaaaagaaattgtatagaccttatttttattttttttcagatgagccagaatgggttaaaatggacttgttgccaaggctttctgtgaaagattgtgcagaagtggttgatataaatggctctgataaaggttatatggatttatatctgttagctcattgtaaacatcaaataacgacgaaaggaactttggggaaatttggagctttgttggcagacaaccctgataagtatgtagtattgtataatgatgaaacacagcaatattggaaaatgttactccagaatccggtttttatatagtttaatgaggttgtgctagacggattgtaatgttttattgaagaaaaagatttgaaaatatattgtagatatcctaaattcttgtagcattataaatgttttattgttaaaaaaagcaattgtttatagatgatgctataattattctatttttgtgcatcctaaacctaaactatatagaatttttatatatgaaaaatctaaagagacagttttattcaaagaactgtaattttgtgcagcaagtgatttttgctttttcttttatatgt

SEQ ID NO: 615 - DNA, 3697 bp, Bacteroides caccae
  source 1..3697: mol_type = genomic DNA
cactggcttcccgatacccctgtttaccggatattcagacattgccgcctttttagaggaagaacgaacgcaggatagtggcggcgacaatcaggaagatgcacgccccgaaccaactggcggcagtctttgaggtatcggggtcgccgcttgaaaacttgttatatacttttaccccgccaatcaagccgcagaccgccccgattgcgtacaccagttttgttccggggtcaaaatacccggtgattaggttcgtggcttcggtgatgcccgcctgcccgtttccttgtgcgtaggcacttaccacggcggcaagtatagccgccgacaagaagattttctttctcattgtgatttgtttttaatgccgggcggtgggtggatagtccgcctttcccggctggtgaataatttgaaattttagtggtcggggatagtcccgtttgtctgtttgttttcaggttgccaatcaaccgtaatcccgttgtttcatgctgtcaggcttataattattatattataggaaatcgttcatgtcgaacgcttcgtgttcctcgcttgtatcgacagttccggcagggacagcagccacagccagttccgcttcgttgcgtcccagcagttccgccacctttgccagcccgccgttgatgttctccaccaccgcatcgtagaggttcgtcccctcaatgcttgccagtgtcccggcggtttgccgtttctccgcttcggtggggttgtcggcgttcgccgtgcgtaccgcttcgcccagttcatcgaagctcacgcccgtagcccgcccggtatcatcgtcaccgtccatgtacccggctatttcctcgtcctcgtagtcgggttcgtcattctcgtaaccgggcgtttcttccgcttcggctgctgtttccggaatgttttcttccggctgtccgtcagcctgcggcgcaaaaatagtatcattttcagccgcttgcgggaggtgtcccgatttgtcctgcgctgtcccgattagtccgcccttgtatcggctttcacctatcagcgtgtagcctgaaaccccgtttcgtgggagtggcgcatcatccgttctgcccgttgatgtccggctgtccgtgtagcgataccacagccatagggcgatatagtacaccaaaagcccggtaagtatgcaatagattatcatagtcagacaggcttttggaagtggctttcgtacagggtgtttatctcgtcttggtactgctcgaagtgccgcagcagaatgttttccacgtagctgcttaccgtcaccttgcgcccgcctatcaccgtcacgatacgcatcagcttctcgtgcgtggtacggctcacgtacaagggctgtcggtctgccagttccactttctgaaagtaagtttcctggtagtcgcccgaaccgcccttgcgcctgcggggtgtcggtttctctacttgcaccgtttctgtttgtgtttcttgcggtacatcattcgtcttattattatcttgtttactgggaacaccctgcgagataagctctttcatgaaatcctcgtctatcttcggcatcccgccgctttgctttgccatatcattttaatttgatgtagtacactatttcggttatcagttcttccaagttgcttccccttaccagcgagcggctggcgggaaagagcgtggagcggaacactgcctttttatccgccaccagttcctttttgtagcgtttggtatcggggataaaggttttcatcagcggcagttccagttccttaatggtcttgtcgtaggcggtgtaaaggtctgttttctccctaccgtccaccatgttccaaaagaggtacagcccggcaagtcggcaggcttcattccttaccaatagcttttggatagccattgcgaacgacaggctgctttccagcaccaccttgtcggcggaaatgggtgtgaaaatgtagtccatgcctgcaagggagtttatcacgccctcgctgttcaccgtgccgggcaggtcgaaaaacacaatatccggcacgtgtccggcggctatatgttcgtcagccgttgcaatcgccttttcaggtgaactgcacaataccgggtaggctttcttccccagtcgggtaaactgttcatacgccattcgcttgtaatcttcatccgccccgacctgctcggcatcccgctttcgcatcccggcaatggagtgttgcgggtagtcgcaatcgaccaccgccacatcgtagcctttgaggtagtagaggtaactcgccgccagcacggtaaaggtggttttgccgactccgcccttttgggtggaaaaggcgacataaaggggtgttttctcgttttccatattgctttcgttcattattggttgatagatttatttattgctttcaatcaatccagccatatagctttctttgtttccatattgcaatcttgaaatattgaaagactgttttatttcaatcttgttttccagctttcattctttcttgaaatattgaaatcctgcaatcacgttttcttgaaatcctgctttctatcctgctttcttgcttgaaatatggctttcaaccttgaaatcttctgcaaataaaaggagaaaaaacgttcgtttttagatgtgtcccgatttgtcctgcgctgtcccgatttgtccaccaaccgcctattttacagcattataaatcaccgttactttgcagcggagtaacgaaccgcagggggcaaaggtgtaaaaccgggctggtgaacggcagggcttgccgttccacgctaaccccaatccgtccgtgacggatttcgattttcgtcagaaaatagcaaggtgtgttttgtatgctacaaaaccgttttccgtgcctgaaaacgccttgccccttgcgggggtaaaaatcactccgaagtcgtaattttttaattgaaagaagcatggaaacaagaaaacctaacaagggcggtcgccccgccctcgcagacccggcgaagcatcgccatgtcctttacctgaacgaccgggagaatgcccgcttcctctcgcaatgggagcagtcgggcgttacgagcaagtcccgtttcatcgccgcccggctgttcggcgagccgttccgggtggtgaaagtggacaaatcggcagtagaatattgcgcccggctgaccgaattttacgcccagttccgggcggttgcagtcaattacaaccaagtcgtaaaggcgttgcacagcaacttttcggagaaaaaggcactggcttttctctataaactggagaaagcgaccaccgaactggcgatgttgaaccgtcaggttatcgacctgacaaacgagtgcagggaactatggttgccaaaataagcacgggcggcaatatgttcggcgcactggcttacaaccaaaacaaggtggacagcggggaagcaaaggtgcttttctccaaccggatgctgttgggcgaggacgggaatttctctatcggcgagtgtatgcgcagctttgaaatgcagatgcccgtccagctatccaccaagaagccgatacttcatatttccataaacccgcacccggaagacgtgctgaccgaccagcagctttccgacatcgccaaagagtatatgcggaagttgggctatggcgaccagccttatctggtgtacaagcataccgacatcgaccgccaccatatccacatcgt

SEQ ID NO: 616 - DNA, 3015 bp, Bacteroides caccae
  source 1..3015: mol_type = genomic DNA
aaagtaaggcattaccccaaatttctgtatttctttctttatcataagtatagttataaagcaaacacataacagttacatcatagccatttacaggttgcctgtactttataaaaatacgtggcttaaagtatttaagctcatcatcaaacaaagtattatacaaaaactttgcacatttcataaaattagctgctgctaacgaatctttcatatcctgttcacttgattgtcttttcctatcacaagataaaacagaacataagaagattggtaatatgcaatataaaattttcctcatggacttttttctaattattacatataagataaatcgccaaaaccacaacaggaatgatgatatacaatgctactgctccttcttcaaaactcccattttctttacgtggacaggtaatatatgctattattgcataaattacaattcctattactactcccataagatttagttaatatttactagtataaaaagtatcttttgtgcaaacgtactgtccctccttaatttttttatattgaatccaaagtttcttagcaatatcattacaagggtcaacgacttctacccaaacattatatttcatatcaacagctactgaagtagtataatttataatcttatacttctttttttgaattgctccattattaaaacaagcaacttctttctgtttaactctttccaatgcaaggttaatgacttcttgcggaactttaggcgtaaaatctaagacagttcttttaggggactgtggagattgagccattattccaatattcgtaaatagtgcaaagacaaataaaaatatatattttaccatataaagaacgaattaatcattaaaaattttcatttcaacatagaatgttcccaataaaaccaatatccagtatagccatgattcatcccatataaacatattgaatcctgcaagttcttctgcatcatattgaaaagatggttctataaacgcaataccaaaaataggaagtgccaatacaaaaagtgctattctcattgccaatgcaacaagtgcaggtgcaaatattgctaatactatttttctttccatattgtcttgtatttataaatctagagctttactttttatagtaattatgtatggctttccacctttgtttacatcaatcaactgccttttggtatttcctgctaaaaaagtttcggtcaatacttgtacatttccttctgtatcaacatattccatgacaaccttatctatagtaaaatccgaataattcttcaaaacccaatatgtgggtggtttaactccccattgtgctaacaatgcagagaaaacggaaatatcaaaaaaagtagcttgaaaaacattctctttcttgttgttcaatcttactgcgcttccaacaggctgaggctcttcacgttcaatcacaagatattttgctatattattacgcacttcttcttttgttgtcgtttgtttttgttcttccttatcatctactctttgattactttggatgttattacaggaaaatagtataaacgaaaatataaaggataatccaataaatagttttttcatattgctttttattttttgattaataatttaatttgtagtataagctgctcaaaaaatgagttggctacttaaaagatagtagcaaaagttgtttcttaatgtctgattcgtagttattcgttttatgcatcctgtccctttagatactgttatacaataaaaaaggtgtggaacgtattgtcttatctcattctctggctctcgcattgcctttggtacggataaaacaatagcccacaccaatattgacaatatctaaagccttaaagatataaggtaggtatatatcaaatggtgtggtgctattgctatcatcttcgtacctttgttcaaatttgcgagatttgagaatggaagataatttcaataacacctttcgtaatatgtcctttcagacctaacacattaggtatctgaaattgccacaaagttacgaaaagcgtttgtaatagcaagaactattgtttattaaaaattgagggctatttctgctttataaatttatggtagtggaaaaattcaagaccacccatataaaaactaaatctctgaatttttccaccccaccgatattttatgcttatggctttataaactgattttttatccgttgaacggtggaaataccaatactttgtagcttagctatatttctgattgaatagccttttcttagtaaagcaatgacttccttatattcttcttttttcttatcatccgttttggttgaacctgtctttctgccaagcttgccacctttagcaatataattcgctctaccactattcaaacgatattggatattgcttctttcgatatttgccatttctgcaagtactgtcaccatgatagaagctattggattaacttccccatttggttgcaaagtatataagcccaagttctgtatgtaaaccgatactttcgattcatgcaatatatccaaagagcgaagaacctgtaatgtacttcttcctagtcttgacaattcagacaaaagtagaatatccacagattcacgtttacagtattccaaacattctcctaaaatctgtctttcctctattttctttgcacctgaaatatgctcctggaatatattcactatttctatatcctgtgaaatagcatatttctttaaatcctctatttgtctgctcgtgtcctgtctgtcattacttgacgaaacacgagcgtatattacggctgttttcattttattctttgattaaattgataacatgaaagaatgtgttcaaaccacctttgcagatttatttgaacacattcctgttttgaacactaacgaggtttattcgcttcctcaatatcccataaacctataaaaatcacaagccatatcaacggcacacacgcactaatcatagccaataccacaaaaaagagccaaacaagtatt

SEQ ID NO: 617 - DNA, 2499 bp, Bacteroides caccae
  source 1..2499: mol_type = genomic DNA
cgtaggctaagagcccagcgccttgccgtatttctacggtaggtttccgagaactcgcctccgaaccgtgcgtacacctctcagcgtacacggctctccactaacatattcagtctatcttaccggcatgtattttgttgtgacagggaatacatactaccatagtctttctctgacgtccaatcatttggatttcccaaggctttttgccttgcaggtctttaagacgcttgacatggtgtatttcgatattaccctcagcaccacacaattcacactttccggcttgcagcctttgtataaggcttgaaacagtggtattgaaaattgtgttggctacattatcacaactcgcttccatagcggtcgttttgcgcttgaagctaccattgaagaacacccgcatcttctttctacctttcttgtcctcatagaaaactgcaaaatccttgttgaatcggtatttcgcaatgattttgcggactgtggtgctgtactttcgtgcaaaagtcttatacatactgtattgcatgatgtacttgaaagaatttaagtgcgaactgttgttggcgattgaaaaatagtttgcaaatcctcggatttccctattgtaagcgtccagtatttcgaggtcgtccagatgtaacattttcgtccgacttgtgggtttccacttcgctttaccttcgaattgatatattttcatcgcttcgtagtaaagaagtttatcccgcatcgtggacattggtacttctaatacaacctttttaccgtaagccttgataagaactcccgatttcttgcccctcaatgtcttatccgtgaacggtcggacatagatttcatagccgaggaatttagccttttgatttccgtgtgtgattaaggtcttttcttcggacagcgttaatttcagtttttcgctgaggaagtttttaatgtcctctttgatagctacgcaatccgctttgctcccaatcactccgataataaaatcatcggcatacctcacatacttaatccgtctatatccctcatccatttcatcgacagagggcaagtgcatcctatttttctgatgttgcttaattgcatcaatcagttctttccgagtttctctatcctcggtttgcttcagctttgtgccgagccaccaaatctttccggaatagcttttgtactcaaggttcattccccgtctttcacctttatcgaatttatcagcgtattctttcatatacttgtccagcttgtcaaggtaaatattagccagtatcgggctaatgatgccaccttgcggtgttccgctgtacgttctgtgaaacgcccaatcttcgatatagcctgcttttagaaacttccatatcagccggataaagcggtcgtctgcgatgcgttctttcaggattccgataagcacatcatggttgatgttatcaaaaaatccttcaatgtcgccctcgataaaccacttagccgcagtaaaattcttctgcacctgtattagtgcggtatggcaactgcgttttggtcggaagccatgcgaggtgttttcaaaacttccttcgtaaattgctcccataatcattcgcagtacctcttgcactaatttatcgtcgaatgacggtatgccgagaggtcgcattttcccgtttttcttcgggatatatgttcttctcgctggtttcggttggtacgattcatttttaagcgcaccaatcaaattttcaatccgttttagactcattccgtcgattgttttaccgtcggaaccctccgtcatattcccttgcttaccttgtatattatgataggcaagtagaaacatatccgaattgaatagaaccctgtagagccgttcaaacttatagtccgaaactttgctgtgctctgacagactgtttaatactttctctggacttctcataatgtctcacacattttccattaatttgtattaaaaaatgttagctgccacccttcgccatgtacgaggctttccctcgctcggactactacggtggctccgttaccataccggattttcataggtctgaaacctaatagcctttcggcattccgggttaggtaatccacgtttagctctttggcaacgtagcttgatagattgtcggatacgactttcgttcgtttctgcttattgcagttgtgctgtaacctgttctgcacccaatcctcaaaggtcgaatcgagtgtgttacagtatggcgtttgtagttaccttccgccatagttccgagttgtaccacttggactatcgttcaatcaatccagactttatcctcatatctatctttcatctcctgattcagtcgcatatctggcaactatatgacttatcagtttatcggcaggctatactccccgtctggtttccctttcggataagccgattgatgataggctatcgaacacttgcctaacgtcttgctattgacgtatttgccaatgaaccattacgtgcgcgcccttgaactc
